United States Patent Application Publication US 2025/0276017 A1 - sequence listing, part 2

SEQ ID NO: 3028 - RNA, 22 nt, synthetic construct
  source 1..22: mol_type = other RNA
  modified_base 1: mod_base = OTHER; note = 2'-O-methyl modified nucleotide attached to position 37 of SEQ ID NO: 2494 via a L1 linker
  modified_base 2: mod_base = OTHER; note = 2'-O-methyl modified nucleotide
  modified_base 6: mod_base = OTHER; note = 2'-O-methyl modified nucleotide
  modified_base 7: mod_base = OTHER; note = 2'-O-methyl modified nucleotide
  modified_base 10: mod_base = OTHER; note = 2'-O-methyl modified nucleotide
  modified_base 13: mod_base = OTHER; note = nucleotide with phosphorothioate linkage
  modified_base 17: mod_base = OTHER; note = 2'-O-methyl modified nucleotide
  modified_base 18: mod_base = OTHER; note = 2'-O-methyl modified nucleotide
  modified_base 20: mod_base = OTHER; note = 2'-O-methyl modified nucleotide
  modified_base 21: mod_base = OTHER; note = 2'-O-methyl modified nucleotide
  modified_base 22: mod_base = OTHER; note = 2'-O-methyl modified nucleotide attached to position 1 of SEQ ID NO: 3123 via a L1 linker
ccgttgctacaataaggccgtc

SEQ ID NO: 3029 - RNA, 22 nt, synthetic construct
  source 1..22: mol_type = other RNA
  modified_base 1: mod_base = OTHER; note = 2'-O-methyl modified nucleotide attached to position 37 of SEQ ID NO: 2495 via a L1 linker
  modified_base 2: mod_base = OTHER; note = 2'-O-methyl modified nucleotide
  modified_base 6: mod_base = OTHER; note = 2'-O-methyl modified nucleotide
  modified_base 7: mod_base = OTHER; note = 2'-O-methyl modified nucleotide
  modified_base 10: mod_base = OTHER; note = 2'-O-methyl modified nucleotide
  modified_base 13: mod_base = OTHER; note = nucleotide with phosphorothioate linkage
  modified_base 17: mod_base = OTHER; note = 2'-O-methyl modified nucleotide
  modified_base 18: mod_base = OTHER; note = 2'-O-methyl modified nucleotide
  modified_base 20: mod_base = OTHER; note = 2'-O-methyl modified nucleotide
  modified_base 21: mod_base = OTHER; note = 2'-O-methyl modified nucleotide
  modified_base 22: mod_base = OTHER; note = 2'-O-methyl modified nucleotide attached to position 1 of SEQ ID NO: 3124 via a L1 linker
ccgttgctacaataaggccgtc

SEQ ID NO: 3030 - RNA, 22 nt, synthetic construct
  source 1..22: mol_type = other RNA
  modified_base 1: mod_base = OTHER; note = 2'-O-methyl modified nucleotide attached to position 37 of SEQ ID NO: 2496 via a L1 linker
  modified_base 2: mod_base = OTHER; note = 2'-O-methyl modified nucleotide
  modified_base 6: mod_base = OTHER; note = 2'-O-methyl modified nucleotide
  modified_base 7: mod_base = OTHER; note = 2'-O-methyl modified nucleotide
  modified_base 10: mod_base = OTHER; note = 2'-O-methyl modified nucleotide
  modified_base 13: mod_base = OTHER; note = nucleotide with phosphorothioate linkage
  modified_base 17: mod_base = OTHER; note = 2'-O-methyl modified nucleotide
  modified_base 18: mod_base = OTHER; note = 2'-O-methyl modified nucleotide
  modified_base 20: mod_base = OTHER; note = 2'-O-methyl modified nucleotide
  modified_base 21: mod_base = OTHER; note = 2'-O-methyl modified nucleotide
  modified_base 22: mod_base = OTHER; note = 2'-O-methyl modified nucleotide attached to position 1 of SEQ ID NO: 3125 via a L1 linker
ccgttgctacaataaggccgtc

SEQ ID NO: 3031 - RNA, 22 nt, synthetic construct
  source 1..22: mol_type = other RNA
  modified_base 1: mod_base = OTHER; note = 2'-O-methyl modified nucleotide attached to position 37 of SEQ ID NO: 2497 via a L1 linker
  modified_base 2: mod_base = OTHER; note = 2'-O-methyl modified nucleotide
  modified_base 6: mod_base = OTHER; note = 2'-O-methyl modified nucleotide
  modified_base 7: mod_base = OTHER; note = 2'-O-methyl modified nucleotide
  modified_base 10: mod_base = OTHER; note = 2'-O-methyl modified nucleotide
  modified_base 13: mod_base = OTHER; note = nucleotide with phosphorothioate linkage
  modified_base 17: mod_base = OTHER; note = 2'-O-methyl modified nucleotide
  modified_base 18: mod_base = OTHER; note = 2'-O-methyl modified nucleotide
  modified_base 20: mod_base = OTHER; note = 2'-O-methyl modified nucleotide
  modified_base 21: mod_base = OTHER; note = 2'-O-methyl modified nucleotide
  modified_base 22: mod_base = OTHER; note = 2'-O-methyl modified nucleotide attached to position 1 of SEQ ID NO: 3126 via a L1 linker
ccgttgctacaataaggccgtc

SEQ ID NO: 3032 - RNA, 22 nt, synthetic construct
  source 1..22: mol_type = other RNA
  modified_base 1: mod_base = OTHER; note = 2'-O-methyl modified nucleotide attached to position 37 of SEQ ID NO: 2498 via a L1 linker
  modified_base 2: mod_base = OTHER; note = 2'-O-methyl modified nucleotide
  modified_base 6: mod_base = OTHER; note = 2'-O-methyl modified nucleotide
  modified_base 7: mod_base = OTHER; note = 2'-O-methyl modified nucleotide
  modified_base 10: mod_base = OTHER; note = 2'-O-methyl modified nucleotide
  modified_base 13: mod_base = OTHER; note = nucleotide with phosphorothioate linkage
  modified_base 17: mod_base = OTHER; note = 2'-O-methyl modified nucleotide
  modified_base 18: mod_base = OTHER; note = 2'-O-methyl modified nucleotide
  modified_base 20: mod_base = OTHER; note = 2'-O-methyl modified nucleotide
  modified_base 21: mod_base = OTHER; note = 2'-O-methyl modified nucleotide
  modified_base 22: mod_base = OTHER; note = 2'-O-methyl modified nucleotide attached to position 1 of SEQ ID NO: 3127 via a L1 linker
ccgttgctacaataaggccgtc

SEQ ID NO: 3033 - RNA, 22 nt, synthetic construct
  source 1..22: mol_type = other RNA
  modified_base 1: mod_base = OTHER; note = 2'-O-methyl modified nucleotide attached to position 37 of SEQ ID NO: 2499 via a L1 linker
  modified_base 2: mod_base = OTHER; note = 2'-O-methyl modified nucleotide
  modified_base 6: mod_base = OTHER; note = 2'-O-methyl modified nucleotide
  modified_base 7: mod_base = OTHER; note = 2'-O-methyl modified nucleotide
  modified_base 10: mod_base = OTHER; note = 2'-O-methyl modified nucleotide
  modified_base 13: mod_base = OTHER; note = nucleotide with phosphorothioate linkage
  modified_base 17: mod_base = OTHER; note = 2'-O-methyl modified nucleotide
  modified_base 18: mod_base = OTHER; note = 2'-O-methyl modified nucleotide
  modified_base 20: mod_base = OTHER; note = 2'-O-methyl modified nucleotide
  modified_base 21: mod_base = OTHER; note = 2'-O-methyl modified nucleotide
  modified_base 22: mod_base = OTHER; note = 2'-O-methyl modified nucleotide attached to position 1 of SEQ ID NO: 3128 via a L1 linker
ccgttgctacaataaggccgtc

SEQ ID NO: 3034 - RNA, 22 nt, synthetic construct
  source 1..22: mol_type = other RNA
  modified_base 1: mod_base = OTHER; note = 2'-O-methyl modified nucleotide attached to position 37 of SEQ ID NO: 2500 via a L1 linker
  modified_base 2: mod_base = OTHER; note = 2'-O-methyl modified nucleotide
  modified_base 6: mod_base = OTHER; note = 2'-O-methyl modified nucleotide
  modified_base 7: mod_base = OTHER; note = 2'-O-methyl modified nucleotide
  modified_base 10: mod_base = OTHER; note = 2'-O-methyl modified nucleotide
  modified_base 13: mod_base = OTHER; note = nucleotide with phosphorothioate linkage
  modified_base 17: mod_base = OTHER; note = 2'-O-methyl modified nucleotide
  modified_base 18: mod_base = OTHER; note = 2'-O-methyl modified nucleotide
  modified_base 20: mod_base = OTHER; note = 2'-O-methyl modified nucleotide
  modified_base 21: mod_base = OTHER; note = 2'-O-methyl modified nucleotide
  modified_base 22: mod_base = OTHER; note = 2'-O-methyl modified nucleotide attached to position 1 of SEQ ID NO: 3129 via a L1 linker
ccgttgctacaataaggccgtc

SEQ ID NO: 3035 - RNA, 22 nt, synthetic construct
  source 1..22: mol_type = other RNA
  modified_base 1: mod_base = OTHER; note = 2'-O-methyl modified nucleotide attached to position 37 of SEQ ID NO: 2501 via a L1 linker
  modified_base 2: mod_base = OTHER; note = 2'-O-methyl modified nucleotide
  modified_base 6: mod_base = OTHER; note = 2'-O-methyl modified nucleotide
  modified_base 7: mod_base = OTHER; note = 2'-O-methyl modified nucleotide
  modified_base 10: mod_base = OTHER; note = 2'-O-methyl modified nucleotide
  modified_base 13: mod_base = OTHER; note = nucleotide with phosphorothioate linkage
  modified_base 17: mod_base = OTHER; note = 2'-O-methyl modified nucleotide
  modified_base 18: mod_base = OTHER; note = 2'-O-methyl modified nucleotide
  modified_base 20: mod_base = OTHER; note = 2'-O-methyl modified nucleotide
  modified_base 21: mod_base = OTHER; note = 2'-O-methyl modified nucleotide
  modified_base 22: mod_base = OTHER; note = 2'-O-methyl modified nucleotide attached to position 1 of SEQ ID NO: 3130 via a L1 linker
ccgttgctacaataaggccgtc

SEQ ID NO: 3036 - RNA, 22 nt, synthetic construct
  source 1..22: mol_type = other RNA
  modified_base 1: mod_base = OTHER; note = 2'-O-methyl modified nucleotide attached to position 37 of SEQ ID NO: 2502 via a L1 linker
  modified_base 2: mod_base = OTHER; note = 2'-O-methyl modified nucleotide
  modified_base 6: mod_base = OTHER; note = 2'-O-methyl modified nucleotide
  modified_base 7: mod_base = OTHER; note = 2'-O-methyl modified nucleotide
  modified_base 10: mod_base = OTHER; note = 2'-O-methyl modified nucleotide
  modified_base 13: mod_base = OTHER; note = nucleotide with phosphorothioate linkage
  modified_base 17: mod_base = OTHER; note = 2'-O-methyl modified nucleotide
  modified_base 18: mod_base = OTHER; note = 2'-O-methyl modified nucleotide
  modified_base 20: mod_base = OTHER; note = 2'-O-methyl modified nucleotide
  modified_base 21: mod_base = OTHER; note = 2'-O-methyl modified nucleotide
  modified_base 22: mod_base = OTHER; note = 2'-O-methyl modified nucleotide attached to position 1 of SEQ ID NO: 3131 via a L1 linker
ccgttgctacaataaggccgtc

SEQ ID NO: 3037 - RNA, 22 nt, synthetic construct
  source 1..22: mol_type = other RNA
  modified_base 1: mod_base = OTHER; note = 2'-O-methyl modified nucleotide attached to position 37 of SEQ ID NO: 2503 via a L1 linker
  modified_base 2: mod_base = OTHER; note = 2'-O-methyl modified nucleotide
  modified_base 6: mod_base = OTHER; note = 2'-O-methyl modified nucleotide
  modified_base 7: mod_base = OTHER; note = 2'-O-methyl modified nucleotide
  modified_base 10: mod_base = OTHER; note = 2'-O-methyl modified nucleotide
  modified_base 13: mod_base = OTHER; note = nucleotide with phosphorothioate linkage
  modified_base 17: mod_base = OTHER; note = 2'-O-methyl modified nucleotide
  modified_base 18: mod_base = OTHER; note = 2'-O-methyl modified nucleotide
  modified_base 20: mod_base = OTHER; note = 2'-O-methyl modified nucleotide
  modified_base 21: mod_base = OTHER; note = 2'-O-methyl modified nucleotide
  modified_base 22: mod_base = OTHER; note = 2'-O-methyl modified nucleotide attached to position 1 of SEQ ID NO: 3132 via a L1 linker
ccgttgctacaataaggccgtc

SEQ ID NO: 3038 - RNA, 22 nt, synthetic construct
  source 1..22: mol_type = other RNA
  modified_base 1: mod_base = OTHER; note = 2'-O-methyl modified nucleotide attached to position 37 of SEQ ID NO: 2504 via a L1 linker
  modified_base 2: mod_base = OTHER; note = 2'-O-methyl modified nucleotide
  modified_base 6: mod_base = OTHER; note = 2'-O-methyl modified nucleotide
  modified_base 7: mod_base = OTHER; note = 2'-O-methyl modified nucleotide
  modified_base 10: mod_base = OTHER; note = 2'-O-methyl modified nucleotide
  modified_base 13: mod_base = OTHER; note = nucleotide with phosphorothioate linkage
  modified_base 17: mod_base = OTHER; note = 2'-O-methyl modified nucleotide
  modified_base 18: mod_base = OTHER; note = 2'-O-methyl modified nucleotide
  modified_base 20: mod_base = OTHER; note = 2'-O-methyl modified nucleotide
  modified_base 21: mod_base = OTHER; note = 2'-O-methyl modified nucleotide
  modified_base 22: mod_base = OTHER; note = 2'-O-methyl modified nucleotide attached to position 1 of SEQ ID NO: 3133 via a L1 linker
ccgttgctacaataaggccgtc

SEQ ID NO: 3039 - RNA, 22 nt, synthetic construct
  source 1..22: mol_type = other RNA
  modified_base 1: mod_base = OTHER; note = 2'-O-methyl modified nucleotide attached to position 37 of SEQ ID NO: 2505 via a L1 linker
  modified_base 2: mod_base = OTHER; note = 2'-O-methyl modified nucleotide
  modified_base 6: mod_base = OTHER; note = 2'-O-methyl modified nucleotide
  modified_base 7: mod_base = OTHER; note = 2'-O-methyl modified nucleotide
  modified_base 10: mod_base = OTHER; note = 2'-O-methyl modified nucleotide
  modified_base 13: mod_base = OTHER; note = nucleotide with phosphorothioate linkage
  modified_base 17: mod_base = OTHER; note = 2'-O-methyl modified nucleotide
  modified_base 18: mod_base = OTHER; note = 2'-O-methyl modified nucleotide
  modified_base 20: mod_base = OTHER; note = 2'-O-methyl modified nucleotide
  modified_base 21: mod_base = OTHER; note = 2'-O-methyl modified nucleotide
  modified_base 22: mod_base = OTHER; note = 2'-O-methyl modified nucleotide attached to position 1 of SEQ ID NO: 3134 via a L1 linker
ccgttgctacaataaggccgtc

SEQ ID NO: 3040 - RNA, 22 nt, synthetic construct
  source 1..22: mol_type = other RNA
  modified_base 1: mod_base = OTHER; note = 2'-O-methyl modified nucleotide attached to position 37 of SEQ ID NO: 2506 via a L1 linker
  modified_base 2: mod_base = OTHER; note = 2'-O-methyl modified nucleotide
  modified_base 6: mod_base = OTHER; note = 2'-O-methyl modified nucleotide
  modified_base 7: mod_base = OTHER; note = 2'-O-methyl modified nucleotide
  modified_base 10: mod_base = OTHER; note = 2'-O-methyl modified nucleotide
  modified_base 13: mod_base = OTHER; note = nucleotide with phosphorothioate linkage
  modified_base 17: mod_base = OTHER; note = 2'-O-methyl modified nucleotide
  modified_base 18: mod_base = OTHER; note = 2'-O-methyl modified nucleotide
  modified_base 20: mod_base = OTHER; note = 2'-O-methyl modified nucleotide
  modified_base 21: mod_base = OTHER; note = 2'-O-methyl modified nucleotide
  modified_base 22: mod_base = OTHER; note = 2'-O-methyl modified nucleotide attached to position 1 of SEQ ID NO: 3135 via a L1 linker
ccgttgctacaataaggccgtc

SEQ ID NO: 3041 - RNA, 22 nt, synthetic construct
  source 1..22: mol_type = other RNA
  modified_base 1: mod_base = OTHER; note = 2'-O-methyl modified nucleotide attached to position 37 of SEQ ID NO: 2507 via a L1 linker
  modified_base 2: mod_base = OTHER; note = 2'-O-methyl modified nucleotide
  modified_base 6: mod_base = OTHER; note = 2'-O-methyl modified nucleotide
  modified_base 7: mod_base = OTHER; note = 2'-O-methyl modified nucleotide
  modified_base 10: mod_base = OTHER; note = 2'-O-methyl modified nucleotide
  modified_base 13: mod_base = OTHER; note = nucleotide with phosphorothioate linkage
  modified_base 17: mod_base = OTHER; note = 2'-O-methyl modified nucleotide
  modified_base 18: mod_base = OTHER; note = 2'-O-methyl modified nucleotide
  modified_base 20: mod_base = OTHER; note = 2'-O-methyl modified nucleotide
  modified_base 21: mod_base = OTHER; note = 2'-O-methyl modified nucleotide
  modified_base 22: mod_base = OTHER; note = 2'-O-methyl modified nucleotide attached to position 1 of SEQ ID NO: 3136 via a L1 linker
ccgttgctacaataaggccgtc

SEQ ID NO: 3042 - RNA, 22 nt, synthetic construct
  source 1..22: mol_type = other RNA
  modified_base 1: mod_base = OTHER; note = 2'-O-methyl modified nucleotide attached to position 37 of SEQ ID NO: 2508 via a L1 linker
  modified_base 2: mod_base = OTHER; note = 2'-O-methyl modified nucleotide
  modified_base 6: mod_base = OTHER; note = 2'-O-methyl modified nucleotide
  modified_base 7: mod_base = OTHER; note = 2'-O-methyl modified nucleotide
  modified_base 10: mod_base = OTHER; note = 2'-O-methyl modified nucleotide
  modified_base 13: mod_base = OTHER; note = nucleotide with phosphorothioate linkage
  modified_base 17: mod_base = OTHER; note = 2'-O-methyl modified nucleotide
  modified_base 18: mod_base = OTHER; note = 2'-O-methyl modified nucleotide
  modified_base 20: mod_base = OTHER; note = 2'-O-methyl modified nucleotide
  modified_base 21: mod_base = OTHER; note = 2'-O-methyl modified nucleotide
  modified_base 22: mod_base = OTHER; note = 2'-O-methyl modified nucleotide attached to position 1 of SEQ ID NO: 3137 via a L1 linker
ccgttgctacaataaggccgtc

SEQ ID NO: 3043 - RNA, 22 nt, synthetic construct
  source 1..22: mol_type = other RNA
  modified_base 1: mod_base = OTHER; note = 2'-O-methyl modified nucleotide attached to position 37 of SEQ ID NO: 2509 via a L1 linker
  modified_base 2: mod_base = OTHER; note = 2'-O-methyl modified nucleotide
  modified_base 6: mod_base = OTHER; note = 2'-O-methyl modified nucleotide
  modified_base 7: mod_base = OTHER; note = 2'-O-methyl modified nucleotide
  modified_base 10: mod_base = OTHER; note = 2'-O-methyl modified nucleotide
  modified_base 13: mod_base = OTHER; note = nucleotide with phosphorothioate linkage
  modified_base 17: mod_base = OTHER; note = 2'-O-methyl modified nucleotide
  modified_base 18: mod_base = OTHER; note = 2'-O-methyl modified nucleotide
  modified_base 20: mod_base = OTHER; note = 2'-O-methyl modified nucleotide
  modified_base 21: mod_base = OTHER; note = 2'-O-methyl modified nucleotide
  modified_base 22: mod_base = OTHER; note = 2'-O-methyl modified nucleotide attached to position 1 of SEQ ID NO: 3138 via a L1 linker
ccgttgctacaataaggccgtc

SEQ ID NO: 3044 - RNA, 22 nt, synthetic construct
  source 1..22: mol_type = other RNA
  modified_base 1: mod_base = OTHER; note = 2'-O-methyl modified nucleotide attached to position 37 of SEQ ID NO: 2510 via a L1 linker
  modified_base 2: mod_base = OTHER; note = 2'-O-methyl modified nucleotide
  modified_base 6: mod_base = OTHER; note = 2'-O-methyl modified nucleotide
  modified_base 7: mod_base = OTHER; note = 2'-O-methyl modified nucleotide
  modified_base 10: mod_base = OTHER; note = 2'-O-methyl modified nucleotide
  modified_base 13: mod_base = OTHER; note = nucleotide with phosphorothioate linkage
  modified_base 17: mod_base = OTHER; note = 2'-O-methyl modified nucleotide
  modified_base 18: mod_base = OTHER; note = 2'-O-methyl modified nucleotide
  modified_base 20: mod_base = OTHER; note = 2'-O-methyl modified nucleotide
  modified_base 21: mod_base = OTHER; note = 2'-O-methyl modified nucleotide
  modified_base 22: mod_base = OTHER; note = 2'-O-methyl modified nucleotide attached to position 1 of SEQ ID NO: 3139 via a L1 linker
ccgttgctacaataaggccgtc

SEQ ID NO: 3045 - RNA, 22 nt, synthetic construct
  source 1..22: mol_type = other RNA
  modified_base 1: mod_base = OTHER; note = 2'-O-methyl modified nucleotide attached to position 37 of SEQ ID NO: 2511 via a L1 linker
  modified_base 2: mod_base = OTHER; note = 2'-O-methyl modified nucleotide
  modified_base 6: mod_base = OTHER; note = 2'-O-methyl modified nucleotide
  modified_base 7: mod_base = OTHER; note = 2'-O-methyl modified nucleotide
  modified_base 10: mod_base = OTHER; note = 2'-O-methyl modified nucleotide
  modified_base 13: mod_base = OTHER; note = nucleotide with phosphorothioate linkage
  modified_base 17: mod_base = OTHER; note = 2'-O-methyl modified nucleotide
  modified_base 18: mod_base = OTHER; note = 2'-O-methyl modified nucleotide
  modified_base 20: mod_base = OTHER; note = 2'-O-methyl modified nucleotide
  modified_base 21: mod_base = OTHER; note = 2'-O-methyl modified nucleotide
  modified_base 22: mod_base = OTHER; note = 2'-O-methyl modified nucleotide attached to position 1 of SEQ ID NO: 3140 via a L1 linker
ccgttgctacaataaggccgtc

SEQ ID NO: 3046 - RNA, 22 nt, synthetic construct
  source 1..22: mol_type = other RNA
  modified_base 1: mod_base = OTHER; note = 2'-O-methyl modified nucleotide attached to position 37 of SEQ ID NO: 2512 via a L1 linker
  modified_base 2: mod_base = OTHER; note = 2'-O-methyl modified nucleotide
  modified_base 6: mod_base = OTHER; note = 2'-O-methyl modified nucleotide
  modified_base 7: mod_base = OTHER; note = 2'-O-methyl modified nucleotide
  modified_base 10: mod_base = OTHER; note = 2'-O-methyl modified nucleotide
  modified_base 13: mod_base = OTHER; note = nucleotide with phosphorothioate linkage
  modified_base 17: mod_base = OTHER; note = 2'-O-methyl modified nucleotide
  modified_base 18: mod_base = OTHER; note = 2'-O-methyl modified nucleotide
  modified_base 20: mod_base = OTHER; note = 2'-O-methyl modified nucleotide
  modified_base 21: mod_base = OTHER; note = 2'-O-methyl modified nucleotide
  modified_base 22: mod_base = OTHER; note = 2'-O-methyl modified nucleotide attached to position 1 of SEQ ID NO: 3141 via a L1 linker
ccgttgctacaataaggccgtc

SEQ ID NO: 3047 - RNA, 22 nt, synthetic construct
  source 1..22: mol_type = other RNA
  modified_base 1: mod_base = OTHER; note = 2'-O-methyl modified nucleotide attached to position 37 of SEQ ID NO: 2513 via a L1 linker
  modified_base 2: mod_base = OTHER; note = 2'-O-methyl modified nucleotide
  modified_base 6: mod_base = OTHER; note = 2'-O-methyl modified nucleotide
  modified_base 7: mod_base = OTHER; note = 2'-O-methyl modified nucleotide
  modified_base 10: mod_base = OTHER; note = 2'-O-methyl modified nucleotide
  modified_base 13: mod_base = OTHER; note = nucleotide with phosphorothioate linkage
  modified_base 17: mod_base = OTHER; note = 2'-O-methyl modified nucleotide
  modified_base 18: mod_base = OTHER; note = 2'-O-methyl modified nucleotide
  modified_base 20: mod_base = OTHER; note = 2'-O-methyl modified nucleotide
  modified_base 21: mod_base = OTHER; note = 2'-O-methyl modified nucleotide
  modified_base 22: mod_base = OTHER; note = 2'-O-methyl modified nucleotide attached to position 1 of SEQ ID NO: 3142 via a L1 linker
ccgttgctacaataaggccgtc

SEQ ID NO: 3048 - RNA, 22 nt, synthetic construct
  source 1..22: mol_type = other RNA
  modified_base 1: mod_base = OTHER; note = 2'-O-methyl modified nucleotide attached to position 37 of SEQ ID NO: 2514 via a L1 linker
  modified_base 2: mod_base = OTHER; note = 2'-O-methyl modified nucleotide
  modified_base 6: mod_base = OTHER; note = 2'-O-methyl modified nucleotide
  modified_base 7: mod_base = OTHER; note = 2'-O-methyl modified nucleotide
  modified_base 10: mod_base = OTHER; note = 2'-O-methyl modified nucleotide
  modified_base 13: mod_base = OTHER; note = nucleotide with phosphorothioate linkage
  modified_base 17: mod_base = OTHER; note = 2'-O-methyl modified nucleotide
  modified_base 18: mod_base = OTHER; note = 2'-O-methyl modified nucleotide
  modified_base 20: mod_base = OTHER; note = 2'-O-methyl modified nucleotide
  modified_base 21: mod_base = OTHER; note = 2'-O-methyl modified nucleotide
  modified_base 22: mod_base = OTHER; note = 2'-O-methyl modified nucleotide attached to position 1 of SEQ ID NO: 3143 via a L1 linker
ccgttgctacaataaggccgtc

SEQ ID NO: 3049 - RNA, 22 nt, synthetic construct
  source 1..22: mol_type = other RNA
  modified_base 1: mod_base = OTHER; note = 2'-O-methyl modified nucleotide attached to position 37 of SEQ ID NO: 2515 via a L1 linker
  modified_base 2: mod_base = OTHER; note = 2'-O-methyl modified nucleotide
  modified_base 6: mod_base = OTHER; note = 2'-O-methyl modified nucleotide
  modified_base 7: mod_base = OTHER; note = 2'-O-methyl modified nucleotide
  modified_base 10: mod_base = OTHER; note = 2'-O-methyl modified nucleotide
  modified_base 13: mod_base = OTHER; note = nucleotide with phosphorothioate linkage
  modified_base 17: mod_base = OTHER; note = 2'-O-methyl modified nucleotide
  modified_base 18: mod_base = OTHER; note = 2'-O-methyl modified nucleotide
  modified_base 20: mod_base = OTHER; note = 2'-O-methyl modified nucleotide
  modified_base 21: mod_base = OTHER; note = 2'-O-methyl modified nucleotide
  modified_base 22: mod_base = OTHER; note = 2'-O-methyl modified nucleotide attached to position 1 of SEQ ID NO: 3144 via a L1 linker
ccgttgctacaataaggccgtc

SEQ ID NO: 3050 - RNA, 22 nt, synthetic construct
  source 1..22: mol_type = other RNA
  modified_base 1: mod_base = OTHER; note = 2'-O-methyl modified nucleotide attached to position 37 of SEQ ID NO: 2516 via a L1 linker
  modified_base 2: mod_base = OTHER; note = 2'-O-methyl modified nucleotide
  modified_base 6: mod_base = OTHER; note = 2'-O-methyl modified nucleotide
  modified_base 7: mod_base = OTHER; note = 2'-O-methyl modified nucleotide
  modified_base 10: mod_base = OTHER; note = 2'-O-methyl modified nucleotide
  modified_base 13: mod_base = OTHER; note = nucleotide with phosphorothioate linkage
  modified_base 17: mod_base = OTHER; note = 2'-O-methyl modified nucleotide
  modified_base 18: mod_base = OTHER; note = 2'-O-methyl modified nucleotide
  modified_base 20: mod_base = OTHER; note = 2'-O-methyl modified nucleotide
  modified_base 21: mod_base = OTHER; note = 2'-O-methyl modified nucleotide
  modified_base 22: mod_base = OTHER; note = 2'-O-methyl modified nucleotide attached to position 1 of SEQ ID NO: 3145 via a L1 linker
ccgttgctacaataaggccgtc

SEQ ID NO: 3051 - RNA, 22 nt, synthetic construct
  source 1..22: mol_type = other RNA
  modified_base 1: mod_base = OTHER; note = 2'-O-methyl modified nucleotide attached to position 37 of SEQ ID NO: 2517 via a L1 linker
  modified_base 2: mod_base = OTHER; note = 2'-O-methyl modified nucleotide
  modified_base 6: mod_base = OTHER; note = 2'-O-methyl modified nucleotide
  modified_base 7: mod_base = OTHER; note = 2'-O-methyl modified nucleotide
  modified_base 10: mod_base = OTHER; note = 2'-O-methyl modified nucleotide
  modified_base 13: mod_base = OTHER; note = nucleotide with phosphorothioate linkage
  modified_base 17: mod_base = OTHER; note = 2'-O-methyl modified nucleotide
  modified_base 18: mod_base = OTHER; note = 2'-O-methyl modified nucleotide
  modified_base 20: mod_base = OTHER; note = 2'-O-methyl modified nucleotide
  modified_base 21: mod_base = OTHER; note = 2'-O-methyl modified nucleotide
  modified_base 22: mod_base = OTHER; note = 2'-O-methyl modified nucleotide attached to position 1 of SEQ ID NO: 3146 via a L1 linker
ccgttgctacaataaggccgtc

SEQ ID NO: 3052 - RNA, 22 nt, synthetic construct
  source 1..22: mol_type = other RNA
  modified_base 1: mod_base = OTHER; note = 2'-O-methyl modified nucleotide attached to position 37 of SEQ ID NO: 2518 via a L1 linker
  modified_base 2: mod_base = OTHER; note = 2'-O-methyl modified nucleotide
  modified_base 6: mod_base = OTHER; note = 2'-O-methyl modified nucleotide
  modified_base 7: mod_base = OTHER; note = 2'-O-methyl modified nucleotide
  modified_base 10: mod_base = OTHER; note = 2'-O-methyl modified nucleotide
  modified_base 13: mod_base = OTHER; note = nucleotide with phosphorothioate linkage
  modified_base 17: mod_base = OTHER; note = 2'-O-methyl modified nucleotide
  modified_base 18: mod_base = OTHER; note = 2'-O-methyl modified nucleotide
  modified_base 20: mod_base = OTHER; note = 2'-O-methyl modified nucleotide
  modified_base 21: mod_base = OTHER; note = 2'-O-methyl modified nucleotide
  modified_base 22: mod_base = OTHER; note = 2'-O-methyl modified nucleotide attached to position 1 of SEQ ID NO: 3147 via a L1 linker
ccgttgctacaataaggccgtc

SEQ ID NO: 3053 - RNA, 22 nt, synthetic construct
  source 1..22: mol_type = other RNA
  modified_base 1: mod_base = OTHER; note = 2'-O-methyl modified nucleotide attached to position 37 of SEQ ID NO: 2519 via a L1 linker
  modified_base 2: mod_base = OTHER; note = 2'-O-methyl modified nucleotide
  modified_base 6: mod_base = OTHER; note = 2'-O-methyl modified nucleotide
  modified_base 7: mod_base = OTHER; note = 2'-O-methyl modified nucleotide
  modified_base 10: mod_base = OTHER; note = 2'-O-methyl modified nucleotide
  modified_base 13: mod_base = OTHER; note = nucleotide with phosphorothioate linkage
  modified_base 17: mod_base = OTHER; note = 2'-O-methyl modified nucleotide
  modified_base 18: mod_base = OTHER; note = 2'-O-methyl modified nucleotide
  modified_base 20: mod_base = OTHER; note = 2'-O-methyl modified nucleotide
  modified_base 21: mod_base = OTHER; note = 2'-O-methyl modified nucleotide
  modified_base 22: mod_base = OTHER; note = 2'-O-methyl modified nucleotide attached to position 1 of SEQ ID NO: 3148 via a L1 linker
ccgttgctacaataaggccgtc

SEQ ID NO: 3054 - RNA, 22 nt, synthetic construct
  source 1..22: mol_type = other RNA
  modified_base 1: mod_base = OTHER; note = 2'-O-methyl modified nucleotide attached to position 37 of SEQ ID NO: 2520 via a L1 linker
  modified_base 2: mod_base = OTHER; note = 2'-O-methyl modified nucleotide
  modified_base 6: mod_base = OTHER; note = 2'-O-methyl modified nucleotide
  modified_base 7: mod_base = OTHER; note = 2'-O-methyl modified nucleotide
  modified_base 10: mod_base = OTHER; note = 2'-O-methyl modified nucleotide
  modified_base 13: mod_base = OTHER; note = nucleotide with phosphorothioate linkage
  modified_base 17: mod_base = OTHER; note = 2'-O-methyl modified nucleotide
  modified_base 18: mod_base = OTHER; note = 2'-O-methyl modified nucleotide
  modified_base 20: mod_base = OTHER; note = 2'-O-methyl modified nucleotide
  modified_base 21: mod_base = OTHER; note = 2'-O-methyl modified nucleotide
  modified_base 22: mod_base = OTHER; note = 2'-O-methyl modified nucleotide attached to position 1 of SEQ ID NO: 3149 via a L1 linker
ccgttgctacaataaggccgtc

SEQ ID NO: 3055 - RNA, 22 nt, synthetic construct
  source 1..22: mol_type = other RNA
  modified_base 1: mod_base = OTHER; note = 2'-O-methyl modified nucleotide attached to position 37 of SEQ ID NO: 2521 via a L1 linker
  modified_base 2: mod_base = OTHER; note = 2'-O-methyl modified nucleotide
  modified_base 6: mod_base = OTHER; note = 2'-O-methyl modified nucleotide
  modified_base 7: mod_base = OTHER; note = 2'-O-methyl modified nucleotide
  modified_base 10: mod_base = OTHER; note = 2'-O-methyl modified nucleotide
  modified_base 13: mod_base = OTHER; note = nucleotide with phosphorothioate linkage
  modified_base 17: mod_base = OTHER; note = 2'-O-methyl modified nucleotide
  modified_base 18: mod_base = OTHER; note = 2'-O-methyl modified nucleotide
  modified_base 20: mod_base = OTHER; note = 2'-O-methyl modified nucleotide
  modified_base 21: mod_base = OTHER; note = 2'-O-methyl modified nucleotide
  modified_base 22: mod_base = OTHER; note = 2'-O-methyl modified nucleotide attached to position 1 of SEQ ID NO: 3150 via a L1 linker
ccgttgctacaataaggccgtc

SEQ ID NO: 3056 - RNA, 22 nt, synthetic construct
  source 1..22: mol_type = other RNA
  modified_base 1: mod_base = OTHER; note = 2'-O-methyl modified nucleotide attached to position 37 of SEQ ID NO: 2522 via a L1 linker
  modified_base 2: mod_base = OTHER; note = 2'-O-methyl modified nucleotide
  modified_base 6: mod_base = OTHER; note = 2'-O-methyl modified nucleotide
  modified_base 7: mod_base = OTHER; note = 2'-O-methyl modified nucleotide
  modified_base 10: mod_base = OTHER; note = 2'-O-methyl modified nucleotide
  modified_base 13: mod_base = OTHER; note = nucleotide with phosphorothioate linkage
  modified_base 17: mod_base = OTHER; note = 2'-O-methyl modified nucleotide
  modified_base 18: mod_base = OTHER; note = 2'-O-methyl modified nucleotide
  modified_base 20: mod_base = OTHER; note = 2'-O-methyl modified nucleotide
  modified_base 21: mod_base = OTHER; note = 2'-O-methyl modified nucleotide
  modified_base 22: mod_base = OTHER; note = 2'-O-methyl modified nucleotide attached to position 1 of SEQ ID NO: 3151 via a L1 linker
ccgttgctacaataaggccgtc

SEQ ID NO: 3057 - RNA, 22 nt, synthetic construct
  source 1..22: mol_type = other RNA
  modified_base 1: mod_base = OTHER; note = 2'-O-methyl modified nucleotide attached to position 37 of SEQ ID NO: 2523 via a L1 linker
  modified_base 2: mod_base = OTHER; note = 2'-O-methyl modified nucleotide
  modified_base 6: mod_base = OTHER; note = 2'-O-methyl modified nucleotide
  modified_base 7: mod_base = OTHER; note = 2'-O-methyl modified nucleotide
  modified_base 10: mod_base = OTHER; note = 2'-O-methyl modified nucleotide
  modified_base 13: mod_base = OTHER; note = nucleotide with phosphorothioate linkage
  modified_base 17: mod_base = OTHER; note = 2'-O-methyl modified nucleotide
  modified_base 18: mod_base = OTHER; note = 2'-O-methyl modified nucleotide
  modified_base 20: mod_base = OTHER; note = 2'-O-methyl modified nucleotide
  modified_base 21: mod_base = OTHER; note = 2'-O-methyl modified nucleotide
  modified_base 22: mod_base = OTHER; note = 2'-O-methyl modified nucleotide attached to position 1 of SEQ ID NO: 3152 via a L1 linker
ccgttgctacaataaggccgtc

SEQ ID NO: 3058 - RNA, 22 nt, synthetic construct
  source 1..22: mol_type = other RNA
  modified_base 1: mod_base = OTHER; note = 2'-O-methyl modified nucleotide attached to position 37 of SEQ ID NO: 2524 via a L1 linker
  modified_base 2: mod_base = OTHER; note = 2'-O-methyl modified nucleotide
  modified_base 6: mod_base = OTHER; note = 2'-O-methyl modified nucleotide
  modified_base 7: mod_base = OTHER; note = 2'-O-methyl modified nucleotide
  modified_base 10: mod_base = OTHER; note = 2'-O-methyl modified nucleotide
  modified_base 13: mod_base = OTHER; note = nucleotide with phosphorothioate linkage
  modified_base 17: mod_base = OTHER; note = 2'-O-methyl modified nucleotide
  modified_base 18: mod_base = OTHER; note = 2'-O-methyl modified nucleotide
  modified_base 20: mod_base = OTHER; note = 2'-O-methyl modified nucleotide
  modified_base 21: mod_base = OTHER; note = 2'-O-methyl modified nucleotide
  modified_base 22: mod_base = OTHER; note = 2'-O-methyl modified nucleotide attached to position 1 of SEQ ID NO: 3153 via a L1 linker
ccgttgctacaataaggccgtc

SEQ ID NO: 3059 - RNA, 22 nt, synthetic construct
  source 1..22: mol_type = other RNA
  modified_base 1: mod_base = OTHER; note = 2'-O-methyl modified nucleotide attached to position 37 of SEQ ID NO: 2525 via a L1 linker
  modified_base 2: mod_base = OTHER; note = 2'-O-methyl modified nucleotide
  modified_base 6: mod_base = OTHER; note = 2'-O-methyl modified nucleotide
  modified_base 7: mod_base = OTHER; note = 2'-O-methyl modified nucleotide
  modified_base 10: mod_base = OTHER; note = 2'-O-methyl modified nucleotide
  modified_base 13: mod_base = OTHER; note = nucleotide with phosphorothioate linkage
  modified_base 17: mod_base = OTHER; note = 2'-O-methyl modified nucleotide
  modified_base 18: mod_base = OTHER; note = 2'-O-methyl modified nucleotide
  modified_base 20: mod_base = OTHER; note = 2'-O-methyl modified nucleotide
  modified_base 21: mod_base = OTHER; note = 2'-O-methyl modified nucleotide
  modified_base 22: mod_base = OTHER; note = 2'-O-methyl modified nucleotide attached to position 1 of SEQ ID NO: 3154 via a L1 linker
ccgttgctacaataaggccgtc

SEQ ID NO: 3060 - RNA, 22 nt, synthetic construct
  source 1..22: mol_type = other RNA
  modified_base 1: mod_base = OTHER; note = 2'-O-methyl modified nucleotide attached to position 37 of SEQ ID NO: 2526 via a L1 linker
  modified_base 2: mod_base = OTHER; note = 2'-O-methyl modified nucleotide
  modified_base 6: mod_base = OTHER; note = 2'-O-methyl modified nucleotide
  modified_base 7: mod_base = OTHER; note = 2'-O-methyl modified nucleotide
  modified_base 10: mod_base = OTHER; note = 2'-O-methyl modified nucleotide
  modified_base 13: mod_base = OTHER; note = nucleotide with phosphorothioate linkage
  modified_base 17: mod_base = OTHER; note = 2'-O-methyl modified nucleotide
  modified_base 18: mod_base = OTHER; note = 2'-O-methyl modified nucleotide
  modified_base 20: mod_base = OTHER; note = 2'-O-methyl modified nucleotide
  modified_base 21: mod_base = OTHER; note = 2'-O-methyl modified nucleotide
  modified_base 22: mod_base = OTHER; note = 2'-O-methyl modified nucleotide attached to position 1 of SEQ ID NO: 3155 via a L1 linker
ccgttgctacaataaggccgtc

SEQ ID NO: 3061 - RNA, 22 nt, synthetic construct
  source 1..22: mol_type = other RNA
  modified_base 1: mod_base = OTHER; note = 2'-O-methyl modified nucleotide attached to position 37 of SEQ ID NO: 2527 via a L1 linker
  modified_base 2: mod_base = OTHER; note = 2'-O-methyl modified nucleotide
  modified_base 6: mod_base = OTHER; note = 2'-O-methyl modified nucleotide
  modified_base 7: mod_base = OTHER; note = 2'-O-methyl modified nucleotide
  modified_base 10: mod_base = OTHER; note = 2'-O-methyl modified nucleotide
  modified_base 13: mod_base = OTHER; note = nucleotide with phosphorothioate linkage
  modified_base 17: mod_base = OTHER; note = 2'-O-methyl modified nucleotide
  modified_base 18: mod_base = OTHER; note = 2'-O-methyl modified nucleotide
  modified_base 20: mod_base = OTHER; note = 2'-O-methyl modified nucleotide
  modified_base 21: mod_base = OTHER; note = 2'-O-methyl modified nucleotide
  modified_base 22: mod_base = OTHER; note = 2'-O-methyl modified nucleotide attached to position 1 of SEQ ID NO: 3156 via a L1 linker
ccgttgctacaataaggccgtc

SEQ ID NO: 3062 - RNA, 22 nt, synthetic construct
  source 1..22: mol_type = other RNA
  modified_base 1: mod_base = OTHER; note = 2'-O-methyl modified nucleotide attached to position 37 of SEQ ID NO: 2528 via a L1 linker
  modified_base 2: mod_base = OTHER; note = 2'-O-methyl modified nucleotide
  modified_base 6: mod_base = OTHER; note = 2'-O-methyl modified nucleotide
  modified_base 7: mod_base = OTHER; note = 2'-O-methyl modified nucleotide
  modified_base 10: mod_base = OTHER; note = 2'-O-methyl modified nucleotide
  modified_base 13: mod_base = OTHER; note = nucleotide with phosphorothioate linkage
  modified_base 17: mod_base = OTHER; note = 2'-O-methyl modified nucleotide
  modified_base 18: mod_base = OTHER; note = 2'-O-methyl modified nucleotide
  modified_base 20: mod_base = OTHER; note = 2'-O-methyl modified nucleotide
  modified_base 21: mod_base = OTHER; note = 2'-O-methyl modified nucleotide
  modified_base 22: mod_base = OTHER; note = 2'-O-methyl modified nucleotide attached to position 1 of SEQ ID NO: 3157 via a L1 linker
ccgttgctacaataaggccgtc

SEQ ID NO: 3063 - RNA, 22 nt, synthetic construct
  source 1..22: mol_type = other RNA
  modified_base 1: mod_base = OTHER; note = 2'-O-methyl modified nucleotide attached to position 37 of SEQ ID NO: 2529 via a L1 linker
  modified_base 2: mod_base = OTHER; note = 2'-O-methyl modified nucleotide
  modified_base 6: mod_base = OTHER; note = 2'-O-methyl modified nucleotide
  modified_base 7: mod_base = OTHER; note = 2'-O-methyl modified nucleotide
  modified_base 10: mod_base = OTHER; note = 2'-O-methyl modified nucleotide
  modified_base 13: mod_base = OTHER; note = nucleotide with phosphorothioate linkage
  modified_base 17: mod_base = OTHER; note = 2'-O-methyl modified nucleotide
  modified_base 18: mod_base = OTHER; note = 2'-O-methyl modified nucleotide
  modified_base 20: mod_base = OTHER; note = 2'-O-methyl modified nucleotide
  modified_base 21: mod_base = OTHER; note = 2'-O-methyl modified nucleotide
  modified_base 22: mod_base = OTHER; note = 2'-O-methyl modified nucleotide attached to position 1 of SEQ ID NO: 3158 via a L1 linker
ccgttgctacaataaggccgtc

SEQ ID NO: 3064 - RNA, 22 nt, synthetic construct
  source 1..22: mol_type = other RNA
  modified_base 1: mod_base = OTHER; note = 2'-O-methyl modified nucleotide attached to position 37 of SEQ ID NO: 2530 via a L1 linker
  modified_base 2: mod_base = OTHER; note = 2'-O-methyl modified nucleotide
  modified_base 6: mod_base = OTHER; note = 2'-O-methyl modified nucleotide
  modified_base 7: mod_base = OTHER; note = 2'-O-methyl modified nucleotide
  modified_base 10: mod_base = OTHER; note = 2'-O-methyl modified nucleotide
  modified_base 13: mod_base = OTHER; note = nucleotide with phosphorothioate linkage
  modified_base 17: mod_base = OTHER; note = 2'-O-methyl modified nucleotide
  modified_base 18: mod_base = OTHER; note = 2'-O-methyl modified nucleotide
  modified_base 20: mod_base = OTHER; note = 2'-O-methyl modified nucleotide
  modified_base 21: mod_base = OTHER; note = 2'-O-methyl modified nucleotide
  modified_base 22: mod_base = OTHER; note = 2'-O-methyl modified nucleotide attached to position 1 of SEQ ID NO: 3159 via a L1 linker
ccgttgctacaataaggccgtc

SEQ ID NO: 3065 - RNA, 22 nt, synthetic construct
  source 1..22: mol_type = other RNA
  modified_base 1: mod_base = OTHER; note = 2'-O-methyl modified nucleotide attached to position 37 of SEQ ID NO: 2531 via a L1 linker
  modified_base 2: mod_base = OTHER; note = 2'-O-methyl modified nucleotide
  modified_base 6: mod_base = OTHER; note = 2'-O-methyl modified nucleotide
  modified_base 7: mod_base = OTHER; note = 2'-O-methyl modified nucleotide
  modified_base 10: mod_base = OTHER; note = 2'-O-methyl modified nucleotide
  modified_base 13: mod_base = OTHER; note = nucleotide with phosphorothioate linkage
  modified_base 17: mod_base = OTHER; note = 2'-O-methyl modified nucleotide
  modified_base 18: mod_base = OTHER; note = 2'-O-methyl modified nucleotide
  modified_base 20: mod_base = OTHER; note = 2'-O-methyl modified nucleotide
  modified_base 21: mod_base = OTHER; note = 2'-O-methyl modified nucleotide
  modified_base 22: mod_base = OTHER; note = 2'-O-methyl modified nucleotide attached to position 1 of SEQ ID NO: 3160 via a L1 linker
ccgttgctacaataaggccgtc

SEQ ID NO: 3066 - RNA, 22 nt, synthetic construct
  source 1..22: mol_type = other RNA
  modified_base 1: mod_base = OTHER; note = 2'-O-methyl modified nucleotide attached to position 37 of SEQ ID NO: 2532 via a L1 linker
  modified_base 2: mod_base = OTHER; note = 2'-O-methyl modified nucleotide
  modified_base 6: mod_base = OTHER; note = 2'-O-methyl modified nucleotide
  modified_base 7: mod_base = OTHER; note = 2'-O-methyl modified nucleotide
  modified_base 10: mod_base = OTHER; note = 2'-O-methyl modified nucleotide
  modified_base 13: mod_base = OTHER; note = nucleotide with phosphorothioate linkage
  modified_base 17: mod_base = OTHER; note = 2'-O-methyl modified nucleotide
  modified_base 18: mod_base = OTHER; note = 2'-O-methyl modified nucleotide
  modified_base 20: mod_base = OTHER; note = 2'-O-methyl modified nucleotide
  modified_base 21: mod_base = OTHER; note = 2'-O-methyl modified nucleotide
  modified_base 22: mod_base = OTHER; note = 2'-O-methyl modified nucleotide attached to position 1 of SEQ ID NO: 3161 via a L1 linker
ccgttgctacaataaggccgtc

SEQ ID NO: 3067 - RNA, 22 nt, synthetic construct
  source 1..22: mol_type = other RNA
  modified_base 1: mod_base = OTHER; note = 2'-O-methyl modified nucleotide attached to position 37 of SEQ ID NO: 2533 via a L1 linker
  modified_base 2: mod_base = OTHER; note = 2'-O-methyl modified nucleotide
  modified_base 6: mod_base = OTHER; note = 2'-O-methyl modified nucleotide
  modified_base 7: mod_base = OTHER; note = 2'-O-methyl modified nucleotide
  modified_base 10: mod_base = OTHER; note = 2'-O-methyl modified nucleotide
  modified_base 13: mod_base = OTHER; note = nucleotide with phosphorothioate linkage
  modified_base 17: mod_base = OTHER; note = 2'-O-methyl modified nucleotide
  modified_base 18: mod_base = OTHER; note = 2'-O-methyl modified nucleotide
  modified_base 20: mod_base = OTHER; note = 2'-O-methyl modified nucleotide
  modified_base 21: mod_base = OTHER; note = 2'-O-methyl modified nucleotide
  modified_base 22: mod_base = OTHER; note = 2'-O-methyl modified nucleotide attached to position 1 of SEQ ID NO: 3162 via a L1 linker
ccgttgctacaataaggccgtc

SEQ ID NO: 3068 - RNA, 22 nt, synthetic construct
  source 1..22: mol_type = other RNA
  modified_base 1: mod_base = OTHER; note = 2'-O-methyl modified nucleotide attached to position 37 of SEQ ID NO: 2534 via a L1 linker
  modified_base 2: mod_base = OTHER; note = 2'-O-methyl modified nucleotide
  modified_base 6: mod_base = OTHER; note = 2'-O-methyl modified nucleotide
  modified_base 7: mod_base = OTHER; note = 2'-O-methyl modified nucleotide
  modified_base 10: mod_base = OTHER; note = 2'-O-methyl modified nucleotide
  modified_base 13: mod_base = OTHER; note = nucleotide with phosphorothioate linkage
  modified_base 17: mod_base = OTHER; note = 2'-O-methyl modified nucleotide
  modified_base 18: mod_base = OTHER; note = 2'-O-methyl modified nucleotide
  modified_base 20: mod_base = OTHER; note = 2'-O-methyl modified nucleotide
  modified_base 21: mod_base = OTHER; note = 2'-O-methyl modified nucleotide
  modified_base 22: mod_base = OTHER; note = 2'-O-methyl modified nucleotide attached to position 1 of SEQ ID NO: 3163 via a L1 linker
ccgttgctacaataaggccgtc

SEQ ID NO: 3069 - RNA, 22 nt, synthetic construct
  source 1..22: mol_type = other RNA
  modified_base 1: mod_base = OTHER; note = 2'-O-methyl modified nucleotide attached to position 37 of SEQ ID NO: 2535 via a L1 linker
  modified_base 2: mod_base = OTHER; note = 2'-O-methyl modified nucleotide
  modified_base 6: mod_base = OTHER; note = 2'-O-methyl modified nucleotide
  modified_base 7: mod_base = OTHER; note = 2'-O-methyl modified nucleotide
  modified_base 10: mod_base = OTHER; note = 2'-O-methyl modified nucleotide
  modified_base 13: mod_base = OTHER; note = nucleotide with phosphorothioate linkage
  modified_base 17: mod_base = OTHER; note = 2'-O-methyl modified nucleotide
  modified_base 18: mod_base = OTHER; note = 2'-O-methyl modified nucleotide
  modified_base 20: mod_base = OTHER; note = 2'-O-methyl modified nucleotide
  modified_base 21: mod_base = OTHER; note = 2'-O-methyl modified nucleotide
  modified_base 22: mod_base = OTHER; note = 2'-O-methyl modified nucleotide attached to position 1 of SEQ ID NO: 3164 via a L1 linker
ccgttgctacaataaggccgtc

SEQ ID NO: 3070 - RNA, 22 nt, synthetic construct
  source 1..22: mol_type = other RNA
  modified_base 1: mod_base = OTHER; note = 2'-O-methyl modified nucleotide attached to position 37 of SEQ ID NO: 2536 via a L1 linker
  modified_base 2: mod_base = OTHER; note = 2'-O-methyl modified nucleotide
  modified_base 6: mod_base = OTHER; note = 2'-O-methyl modified nucleotide
  modified_base 7: mod_base = OTHER; note = 2'-O-methyl modified nucleotide
  modified_base 10: mod_base = OTHER; note = 2'-O-methyl modified nucleotide
  modified_base 13: mod_base = OTHER; note = nucleotide with phosphorothioate linkage
  modified_base 17: mod_base = OTHER; note = 2'-O-methyl modified nucleotide
  modified_base 18: mod_base = OTHER; note = 2'-O-methyl modified nucleotide
  modified_base 20: mod_base = OTHER; note = 2'-O-methyl modified nucleotide
  modified_base 21: mod_base = OTHER; note = 2'-O-methyl modified nucleotide
  modified_base 22: mod_base = OTHER; note = 2'-O-methyl modified nucleotide attached to position 1 of SEQ ID NO: 3165 via a L1 linker
ccgttgctacaataaggccgtc

SEQ ID NO: 3071 - RNA, 22 nt, synthetic construct
  source 1..22: mol_type = other RNA
  modified_base 1: mod_base = OTHER; note = 2'-O-methyl modified nucleotide attached to position 37 of SEQ ID NO: 2537 via a L1 linker
  modified_base 2: mod_base = OTHER; note = 2'-O-methyl modified nucleotide
  modified_base 6: mod_base = OTHER; note = 2'-O-methyl modified nucleotide
  modified_base 7: mod_base = OTHER; note = 2'-O-methyl modified nucleotide
  modified_base 10: mod_base = OTHER; note = 2'-O-methyl modified nucleotide
  modified_base 13: mod_base = OTHER; note = nucleotide with phosphorothioate linkage
  modified_base 17: mod_base = OTHER; note = 2'-O-methyl modified nucleotide
  modified_base 18: mod_base = OTHER; note = 2'-O-methyl modified nucleotide
  modified_base 20: mod_base = OTHER; note = 2'-O-methyl modified nucleotide
  modified_base 21: mod_base = OTHER; note = 2'-O-methyl modified nucleotide
  modified_base 22: mod_base = OTHER; note = 2'-O-methyl modified nucleotide attached to position 1 of SEQ ID NO: 3166 via a L1 linker
ccgttgctacaataaggccgtc

SEQ ID NO: 3072 - RNA, 22 nt, synthetic construct
  source 1..22: mol_type = other RNA
  modified_base 1: mod_base = OTHER; note = 2'-O-methyl modified nucleotide attached to position 37 of SEQ ID NO: 2538 via a L1 linker
  modified_base 2: mod_base = OTHER; note = 2'-O-methyl modified nucleotide
  modified_base 6: mod_base = OTHER; note = 2'-O-methyl modified nucleotide
  modified_base 7: mod_base = OTHER; note = 2'-O-methyl modified nucleotide
  modified_base 10: mod_base = OTHER; note = 2'-O-methyl modified nucleotide
  modified_base 13: mod_base = OTHER; note = nucleotide with phosphorothioate linkage
  modified_base 17: mod_base = OTHER; note = 2'-O-methyl modified nucleotide
  modified_base 18: mod_base = OTHER; note = 2'-O-methyl modified nucleotide
  modified_base 20: mod_base = OTHER; note = 2'-O-methyl modified nucleotide
  modified_base 21: mod_base = OTHER; note = 2'-O-methyl modified nucleotide
  modified_base 22: mod_base = OTHER; note = 2'-O-methyl modified nucleotide attached to position 1 of SEQ ID NO: 3167 via a L1 linker
ccgttgctacaataaggccgtc

SEQ ID NO: 3073 - RNA, 22 nt, synthetic construct
  source 1..22: mol_type = other RNA
  modified_base 1: mod_base = OTHER; note = 2'-O-methyl modified nucleotide attached to position 37 of SEQ ID NO: 2539 via a L1 linker
  modified_base 2: mod_base = OTHER; note = 2'-O-methyl modified nucleotide
  modified_base 6: mod_base = OTHER; note = 2'-O-methyl modified nucleotide
  modified_base 7: mod_base = OTHER; note = 2'-O-methyl modified nucleotide
  modified_base 10: mod_base = OTHER; note = 2'-O-methyl modified nucleotide
  modified_base 13: mod_base = OTHER; note = nucleotide with phosphorothioate linkage
  modified_base 17: mod_base = OTHER; note = 2'-O-methyl modified nucleotide
  modified_base 18: mod_base = OTHER; note = 2'-O-methyl modified nucleotide
  modified_base 20: mod_base = OTHER; note = 2'-O-methyl modified nucleotide
  modified_base 21: mod_base = OTHER; note = 2'-O-methyl modified nucleotide
  modified_base 22: mod_base = OTHER; note = 2'-O-methyl modified nucleotide attached to position 1 of SEQ ID NO: 3168 via a L1 linker
ccgttgctacaataaggccgtc

SEQ ID NO: 3074 - RNA, 22 nt, synthetic construct
  source 1..22: mol_type = other RNA
  modified_base 1: mod_base = OTHER; note = 2'-O-methyl modified nucleotide attached to position 37 of SEQ ID NO: 2540 via a L1 linker
  modified_base 2: mod_base = OTHER; note = 2'-O-methyl modified nucleotide
  modified_base 6: mod_base = OTHER; note = 2'-O-methyl modified nucleotide
  modified_base 7: mod_base = OTHER; note = 2'-O-methyl modified nucleotide
  modified_base 10: mod_base = OTHER; note = 2'-O-methyl modified nucleotide
  modified_base 13: mod_base = OTHER; note = nucleotide with phosphorothioate linkage
  modified_base 17: mod_base = OTHER; note = 2'-O-methyl modified nucleotide
  modified_base 18: mod_base = OTHER; note = 2'-O-methyl modified nucleotide
  modified_base 20: mod_base = OTHER; note = 2'-O-methyl modified nucleotide
  modified_base 21: mod_base = OTHER; note = 2'-O-methyl modified nucleotide
  modified_base 22: mod_base = OTHER; note = 2'-O-methyl modified nucleotide attached to position 1 of SEQ ID NO: 3169 via a L1 linker
ccgttgctacaataaggccgtc

SEQ ID NO: 3075 - RNA, 22 nt, synthetic construct
  source 1..22: mol_type = other RNA
  modified_base 1: mod_base = OTHER; note = 2'-O-methyl modified nucleotide attached to position 37 of SEQ ID NO: 2541 via a L1 linker
  modified_base 2: mod_base = OTHER; note = 2'-O-methyl modified nucleotide
  modified_base 6: mod_base = OTHER; note = 2'-O-methyl modified nucleotide
  modified_base 7: mod_base = OTHER; note = 2'-O-methyl modified nucleotide
  modified_base 10: mod_base = OTHER; note = 2'-O-methyl modified nucleotide
  modified_base 13: mod_base = OTHER; note = nucleotide with phosphorothioate linkage
  modified_base 17: mod_base = OTHER; note = 2'-O-methyl modified nucleotide
  modified_base 18: mod_base = OTHER; note = 2'-O-methyl modified nucleotide
  modified_base 20: mod_base = OTHER; note = 2'-O-methyl modified nucleotide
  modified_base 21: mod_base = OTHER; note = 2'-O-methyl modified nucleotide
  modified_base 22: mod_base = OTHER; note = 2'-O-methyl modified nucleotide attached to position 1 of SEQ ID NO: 3170 via a L1 linker
ccgttgctacaataaggccgtc

SEQ ID NO: 3076 - RNA, 22 nt, synthetic construct
  source 1..22: mol_type = other RNA
  modified_base 1: mod_base = OTHER; note = 2'-O-methyl modified nucleotide attached to position 37 of SEQ ID NO: 2542 via a L1 linker
  modified_base 2: mod_base = OTHER; note = 2'-O-methyl modified nucleotide
  modified_base 6: mod_base = OTHER; note = 2'-O-methyl modified nucleotide
  modified_base 7: mod_base = OTHER; note = 2'-O-methyl modified nucleotide
  modified_base 10: mod_base = OTHER; note = 2'-O-methyl modified nucleotide
  modified_base 13: mod_base = OTHER; note = nucleotide with phosphorothioate linkage
  modified_base 17: mod_base = OTHER; note = 2'-O-methyl modified nucleotide
  modified_base 18: mod_base = OTHER; note = 2'-O-methyl modified nucleotide
  modified_base 20: mod_base = OTHER; note = 2'-O-methyl modified nucleotide
  modified_base 21: mod_base = OTHER; note = 2'-O-methyl modified nucleotide
  modified_base 22: mod_base = OTHER; note = 2'-O-methyl modified nucleotide attached to position 1 of SEQ ID NO: 3171 via a L1 linker
ccgttgctacaataaggccgtc

SEQ ID NO: 3077 - RNA, 22 nt, synthetic construct
  source 1..22: mol_type = other RNA
  modified_base 1: mod_base = OTHER; note = 2'-O-methyl modified nucleotide attached to position 37 of SEQ ID NO: 2543 via a L1 linker
  modified_base 2: mod_base = OTHER; note = 2'-O-methyl modified nucleotide
  modified_base 6: mod_base = OTHER; note = 2'-O-methyl modified nucleotide
  modified_base 7: mod_base = OTHER; note = 2'-O-methyl modified nucleotide
  modified_base 10: mod_base = OTHER; note = 2'-O-methyl modified nucleotide
  modified_base 13: mod_base = OTHER; note = nucleotide with phosphorothioate linkage
  modified_base 17: mod_base = OTHER; note = 2'-O-methyl modified nucleotide
  modified_base 18: mod_base = OTHER; note = 2'-O-methyl modified nucleotide
  modified_base 20: mod_base = OTHER; note = 2'-O-methyl modified nucleotide
  modified_base 21: mod_base = OTHER; note = 2'-O-methyl modified nucleotide
  modified_base 22: mod_base = OTHER; note = 2'-O-methyl modified nucleotide attached to position 1 of SEQ ID NO: 3172 via a L1 linker
ccgttgctacaataaggccgtc

SEQ ID NO: 3078 - RNA, 22 nt, synthetic construct
  source 1..22: mol_type = other RNA
  modified_base 1: mod_base = OTHER; note = 2'-O-methyl modified nucleotide attached to position 37 of SEQ ID NO: 2544 via a L1 linker
  modified_base 2: mod_base = OTHER; note = 2'-O-methyl modified nucleotide
  modified_base 6: mod_base = OTHER; note = 2'-O-methyl modified nucleotide
  modified_base 7: mod_base = OTHER; note = 2'-O-methyl modified nucleotide
  modified_base 10: mod_base = OTHER; note = 2'-O-methyl modified nucleotide
  modified_base 13: mod_base = OTHER; note = nucleotide with phosphorothioate linkage
  modified_base 17: mod_base = OTHER; note = 2'-O-methyl modified nucleotide
  modified_base 18: mod_base = OTHER; note = 2'-O-methyl modified nucleotide
  modified_base 20: mod_base = OTHER; note = 2'-O-methyl modified nucleotide
  modified_base 21: mod_base = OTHER; note = 2'-O-methyl modified nucleotide
  modified_base 22: mod_base = OTHER; note = 2'-O-methyl modified nucleotide attached to position 1 of SEQ ID NO: 3173 via a L1 linker
ccgttgctacaataaggccgtc

SEQ ID NO: 3079 - RNA, 22 nt, synthetic construct
  source 1..22: mol_type = other RNA
  modified_base 1: mod_base = OTHER; note = 2'-O-methyl modified nucleotide attached to position 37 of SEQ ID NO: 2545 via a L1 linker
  modified_base 2: mod_base = OTHER; note = 2'-O-methyl modified nucleotide
  modified_base 6: mod_base = OTHER; note = 2'-O-methyl modified nucleotide
  modified_base 7: mod_base = OTHER; note = 2'-O-methyl modified nucleotide
  modified_base 10: mod_base = OTHER; note = 2'-O-methyl modified nucleotide
  modified_base 13: mod_base = OTHER; note = nucleotide with phosphorothioate linkage
  modified_base 17: mod_base = OTHER; note = 2'-O-methyl modified nucleotide
  modified_base 18: mod_base = OTHER; note = 2'-O-methyl modified nucleotide
  modified_base 20: mod_base = OTHER; note = 2'-O-methyl modified nucleotide
  modified_base 21: mod_base = OTHER; note = 2'-O-methyl modified nucleotide
  modified_base 22: mod_base = OTHER; note = 2'-O-methyl modified nucleotide attached to position 1 of SEQ ID NO: 3174 via a L1 linker
ccgttgctacaataaggccgtc

SEQ ID NO: 3080 - RNA, 22 nt, synthetic construct
  source 1..22: mol_type = other RNA
  modified_base 1: mod_base = OTHER; note = 2'-O-methyl modified nucleotide attached to position 37 of SEQ ID NO: 2546 via a L1 linker
  modified_base 2: mod_base = OTHER; note = 2'-O-methyl modified nucleotide
  modified_base 6: mod_base = OTHER; note = 2'-O-methyl modified nucleotide
  modified_base 7: mod_base = OTHER; note = 2'-O-methyl modified nucleotide
  modified_base 10: mod_base = OTHER; note = 2'-O-methyl modified nucleotide
  modified_base 13: mod_base = OTHER; note = nucleotide with phosphorothioate linkage
  modified_base 17: mod_base = OTHER; note = 2'-O-methyl modified nucleotide
  modified_base 18: mod_base = OTHER; note = 2'-O-methyl modified nucleotide
  modified_base 20: mod_base = OTHER; note = 2'-O-methyl modified nucleotide
  modified_base 21: mod_base = OTHER; note = 2'-O-methyl modified nucleotide
  modified_base 22: mod_base = OTHER; note = 2'-O-methyl modified nucleotide attached to position 1 of SEQ ID NO: 3175 via a L1 linker
ccgttgctacaataaggccgtc

SEQ ID NO: 3081 - RNA, 22 nt, synthetic construct
  source 1..22: mol_type = other RNA
  modified_base 1: mod_base = OTHER; note = 2'-O-methyl modified nucleotide attached to position 37 of SEQ ID NO: 2547 via a L1 linker
  modified_base 2: mod_base = OTHER; note = 2'-O-methyl modified nucleotide
  modified_base 6: mod_base = OTHER; note = 2'-O-methyl modified nucleotide
  modified_base 7: mod_base = OTHER; note = 2'-O-methyl modified nucleotide
  modified_base 10: mod_base = OTHER; note = 2'-O-methyl modified nucleotide
  modified_base 13: mod_base = OTHER; note = nucleotide with phosphorothioate linkage
  modified_base 17: mod_base = OTHER; note = 2'-O-methyl modified nucleotide
  modified_base 18: mod_base = OTHER; note = 2'-O-methyl modified nucleotide
  modified_base 20: mod_base = OTHER; note = 2'-O-methyl modified nucleotide
  modified_base 21: mod_base = OTHER; note = 2'-O-methyl modified nucleotide
  modified_base 22: mod_base = OTHER; note = 2'-O-methyl modified nucleotide attached to position 1 of SEQ ID NO: 3176 via a L1 linker
ccgttgctacaataaggccgtc

SEQ ID NO: 3082 - RNA, 22 nt, synthetic construct
  source 1..22: mol_type = other RNA
  modified_base 1: mod_base = OTHER; note = 2'-O-methyl modified nucleotide attached to position 37 of SEQ ID NO: 2548 via a L1 linker
  modified_base 2: mod_base = OTHER; note = 2'-O-methyl modified nucleotide
  modified_base 6: mod_base = OTHER; note = 2'-O-methyl modified nucleotide
  modified_base 7: mod_base = OTHER; note = 2'-O-methyl modified nucleotide
  modified_base 10: mod_base = OTHER; note = 2'-O-methyl modified nucleotide
  modified_base 13: mod_base = OTHER; note = nucleotide with phosphorothioate linkage
  modified_base 17: mod_base = OTHER; note = 2'-O-methyl modified nucleotide
  modified_base 18: mod_base = OTHER; note = 2'-O-methyl modified nucleotide
  modified_base 20: mod_base = OTHER; note = 2'-O-methyl modified nucleotide
  modified_base 21: mod_base = OTHER; note = 2'-O-methyl modified nucleotide
  modified_base 22: mod_base = OTHER; note = 2'-O-methyl modified nucleotide attached to position 1 of SEQ ID NO: 3177 via a L1 linker
ccgttgctacaataaggccgtc

SEQ ID NO: 3083 - RNA, 22 nt, synthetic construct
  source 1..22: mol_type = other RNA
  modified_base 1: mod_base = OTHER; note = 2'-O-methyl modified nucleotide attached to position 37 of SEQ ID NO: 2549 via a L1 linker
  modified_base 2: mod_base = OTHER; note = 2'-O-methyl modified nucleotide
  modified_base 6: mod_base = OTHER; note = 2'-O-methyl modified nucleotide
  modified_base 7: mod_base = OTHER; note = 2'-O-methyl modified nucleotide
  modified_base 10: mod_base = OTHER; note = 2'-O-methyl modified nucleotide
  modified_base 13: mod_base = OTHER; note = nucleotide with phosphorothioate linkage
  modified_base 17: mod_base = OTHER; note = 2'-O-methyl modified nucleotide
  modified_base 18: mod_base = OTHER; note = 2'-O-methyl modified nucleotide
  modified_base 20: mod_base = OTHER; note = 2'-O-methyl modified nucleotide
  modified_base 21: mod_base = OTHER; note = 2'-O-methyl modified nucleotide
  modified_base 22: mod_base = OTHER; note = 2'-O-methyl modified nucleotide attached to position 1 of SEQ ID NO: 3178 via a L1 linker
ccgttgctacaataaggccgtc

SEQ ID NO: 3084 - RNA, 22 nt, synthetic construct
  source 1..22: mol_type = other RNA
  modified_base 1: mod_base = OTHER; note = 2'-O-methyl modified nucleotide attached to position 37 of SEQ ID NO: 2550 via a L1 linker
  modified_base 2: mod_base = OTHER; note = 2'-O-methyl modified nucleotide
  modified_base 6: mod_base = OTHER; note = 2'-O-methyl modified nucleotide
  modified_base 7: mod_base = OTHER; note = 2'-O-methyl modified nucleotide
  modified_base 10: mod_base = OTHER; note = 2'-O-methyl modified nucleotide
  modified_base 13: mod_base = OTHER; note = nucleotide with phosphorothioate linkage
  modified_base 17: mod_base = OTHER; note = 2'-O-methyl modified nucleotide
  modified_base 18: mod_base = OTHER; note = 2'-O-methyl modified nucleotide
  modified_base 20: mod_base = OTHER; note = 2'-O-methyl modified nucleotide
  modified_base 21: mod_base = OTHER; note = 2'-O-methyl modified nucleotide
  modified_base 22: mod_base = OTHER; note = 2'-O-methyl modified nucleotide attached to position 1 of SEQ ID NO: 3179 via a L1 linker
ccgttgctacaataaggccgtc

SEQ ID NO: 3085 - RNA, 22 nt, synthetic construct
  source 1..22: mol_type = other RNA
  modified_base 1: mod_base = OTHER; note = 2'-O-methyl modified nucleotide attached to position 37 of SEQ ID NO: 2551 via a L1 linker
  modified_base 2: mod_base = OTHER; note = 2'-O-methyl modified nucleotide
  modified_base 6: mod_base = OTHER; note = 2'-O-methyl modified nucleotide
  modified_base 7: mod_base = OTHER; note = 2'-O-methyl modified nucleotide
  modified_base 10: mod_base = OTHER; note = 2'-O-methyl modified nucleotide
  modified_base 13: mod_base = OTHER; note = nucleotide with phosphorothioate linkage
  modified_base 17: mod_base = OTHER; note = 2'-O-methyl modified nucleotide
  modified_base 18: mod_base = OTHER; note = 2'-O-methyl modified nucleotide
  modified_base 20: mod_base = OTHER; note = 2'-O-methyl modified nucleotide
  modified_base 21: mod_base = OTHER; note = 2'-O-methyl modified nucleotide
  modified_base 22: mod_base = OTHER; note = 2'-O-methyl modified nucleotide attached to position 1 of SEQ ID NO: 3180 via a L1 linker
ccgttgctacaataaggccgtc

SEQ ID NO: 3086 - RNA, 22 nt, synthetic construct
  source 1..22: mol_type = other RNA
  modified_base 1: mod_base = OTHER; note = 2'-O-methyl modified nucleotide attached to position 37 of SEQ ID NO: 2552 via a L1 linker
  modified_base 2: mod_base = OTHER; note = 2'-O-methyl modified nucleotide
  modified_base 6: mod_base = OTHER; note = 2'-O-methyl modified nucleotide
  modified_base 7: mod_base = OTHER; note = 2'-O-methyl modified nucleotide
  modified_base 10: mod_base = OTHER; note = 2'-O-methyl modified nucleotide
  modified_base 13: mod_base = OTHER; note = nucleotide with phosphorothioate linkage
  modified_base 17: mod_base = OTHER; note = 2'-O-methyl modified nucleotide
  modified_base 18: mod_base = OTHER; note = 2'-O-methyl modified nucleotide
  modified_base 20: mod_base = OTHER; note = 2'-O-methyl modified nucleotide
  modified_base 21: mod_base = OTHER; note = 2'-O-methyl modified nucleotide
  modified_base 22: mod_base = OTHER; note = 2'-O-methyl modified nucleotide attached to position 1 of SEQ ID NO: 3181 via a L1 linker
ccgttgctacaataaggccgtc

SEQ ID NO: 3087 - RNA, 22 nt, synthetic construct
  source 1..22: mol_type = other RNA
  modified_base 1: mod_base = OTHER; note = 2'-O-methyl modified nucleotide attached to position 37 of SEQ ID NO: 2553 via a L1 linker
  modified_base 2: mod_base = OTHER; note = 2'-O-methyl modified nucleotide
  modified_base 6: mod_base = OTHER; note = 2'-O-methyl modified nucleotide
  modified_base 7: mod_base = OTHER; note = 2'-O-methyl modified nucleotide
  modified_base 10: mod_base = OTHER; note = 2'-O-methyl modified nucleotide
  modified_base 13: mod_base = OTHER; note = nucleotide with phosphorothioate linkage
  modified_base 17: mod_base = OTHER; note = 2'-O-methyl modified nucleotide
  modified_base 18: mod_base = OTHER; note = 2'-O-methyl modified nucleotide
  modified_base 20: mod_base = OTHER; note = 2'-O-methyl modified nucleotide
  modified_base 21: mod_base = OTHER; note = 2'-O-methyl modified nucleotide
  modified_base 22: mod_base = OTHER; note = 2'-O-methyl modified nucleotide attached to position 1 of SEQ ID NO: 3182 via a L1 linker
ccgttgctacaataaggccgtc

SEQ ID NO: 3088 - RNA, 22 nt, synthetic construct
  source 1..22: mol_type = other RNA
  modified_base 1: mod_base = OTHER; note = 2'-O-methyl modified nucleotide attached to position 37 of SEQ ID NO: 2554 via a L1 linker
  modified_base 2: mod_base = OTHER; note = 2'-O-methyl modified nucleotide
  modified_base 6: mod_base = OTHER; note = 2'-O-methyl modified nucleotide
  modified_base 7: mod_base = OTHER; note = 2'-O-methyl modified nucleotide
  modified_base 10: mod_base = OTHER; note = 2'-O-methyl modified nucleotide
  modified_base 13: mod_base = OTHER; note = nucleotide with phosphorothioate linkage
  modified_base 17: mod_base = OTHER; note = 2'-O-methyl modified nucleotide
  modified_base 18: mod_base = OTHER; note = 2'-O-methyl modified nucleotide
  modified_base 20: mod_base = OTHER; note = 2'-O-methyl modified nucleotide
  modified_base 21: mod_base = OTHER; note = 2'-O-methyl modified nucleotide
  modified_base 22: mod_base = OTHER; note = 2'-O-methyl modified nucleotide attached to position 1 of SEQ ID NO: 3183 via a L1 linker
ccgttgctacaataaggccgtc

SEQ ID NO: 3089 - RNA, 22 nt, synthetic construct
  source 1..22: mol_type = other RNA
  modified_base 1: mod_base = OTHER; note = 2'-O-methyl modified nucleotide attached to position 37 of SEQ ID NO: 2555 via a L1 linker
  modified_base 2: mod_base = OTHER; note = 2'-O-methyl modified nucleotide
  modified_base 6: mod_base = OTHER; note = 2'-O-methyl modified nucleotide
  modified_base 7: mod_base = OTHER; note = 2'-O-methyl modified nucleotide
  modified_base 10: mod_base = OTHER; note = 2'-O-methyl modified nucleotide
  modified_base 13: mod_base = OTHER; note = nucleotide with phosphorothioate linkage
  modified_base 17: mod_base = OTHER; note = 2'-O-methyl modified nucleotide
  modified_base 18: mod_base = OTHER; note = 2'-O-methyl modified nucleotide
  modified_base 20: mod_base = OTHER; note = 2'-O-methyl modified nucleotide
  modified_base 21: mod_base = OTHER; note = 2'-O-methyl modified nucleotide
  modified_base 22: mod_base = OTHER; note = 2'-O-methyl modified nucleotide attached to position 1 of SEQ ID NO: 3184 via a L1 linker
ccgttgctacaataaggccgtc

SEQ ID NO: 3090 - RNA, 22 nt, synthetic construct
  source 1..22: mol_type = other RNA
  modified_base 1: mod_base = OTHER; note = 2'-O-methyl modified nucleotide attached to position 37 of SEQ ID NO: 2556 via a L1 linker
  modified_base 2: mod_base = OTHER; note = 2'-O-methyl modified nucleotide
  modified_base 6: mod_base = OTHER; note = 2'-O-methyl modified nucleotide
  modified_base 7: mod_base = OTHER; note = 2'-O-methyl modified nucleotide
  modified_base 10: mod_base = OTHER; note = 2'-O-methyl modified nucleotide
  modified_base 13: mod_base = OTHER; note = nucleotide with phosphorothioate linkage
  modified_base 17: mod_base = OTHER; note = 2'-O-methyl modified nucleotide
  modified_base 18: mod_base = OTHER; note = 2'-O-methyl modified nucleotide
  modified_base 20: mod_base = OTHER; note = 2'-O-methyl modified nucleotide
  modified_base 21: mod_base = OTHER; note = 2'-O-methyl modified nucleotide
  modified_base 22: mod_base = OTHER; note = 2'-O-methyl modified nucleotide attached to position 1 of SEQ ID NO: 3185 via a L1 linker
ccgttgctacaataaggccgtc

SEQ ID NO: 3091 - RNA, 22 nt, synthetic construct
  source 1..22: mol_type = other RNA
  modified_base 1: mod_base = OTHER; note = 2'-O-methyl modified nucleotide attached to position 37 of SEQ ID NO: 2557 via a L1 linker
  modified_base 2: mod_base = OTHER; note = 2'-O-methyl modified nucleotide
  modified_base 6: mod_base = OTHER; note = 2'-O-methyl modified nucleotide
  modified_base 7: mod_base = OTHER; note = 2'-O-methyl modified nucleotide
  modified_base 10: mod_base = OTHER; note = 2'-O-methyl modified nucleotide
  modified_base 13: mod_base = OTHER; note = nucleotide with phosphorothioate linkage
  modified_base 17: mod_base = OTHER; note = 2'-O-methyl modified nucleotide
  modified_base 18: mod_base = OTHER; note = 2'-O-methyl modified nucleotide
  modified_base 20: mod_base = OTHER; note = 2'-O-methyl modified nucleotide
  modified_base 21: mod_base = OTHER; note = 2'-O-methyl modified nucleotide
  modified_base 22: mod_base = OTHER; note = 2'-O-methyl modified nucleotide attached to position 1 of SEQ ID NO: 3186 via a L1 linker
ccgttgctacaataaggccgtc

SEQ ID NO: 3092 - RNA, 22 nt, synthetic construct
  source 1..22: mol_type = other RNA
  modified_base 1: mod_base = OTHER; note = 2'-O-methyl modified nucleotide attached to position 37 of SEQ ID NO: 2558 via a L1 linker
  modified_base 2: mod_base = OTHER; note = 2'-O-methyl modified nucleotide
  modified_base 6: mod_base = OTHER; note = 2'-O-methyl modified nucleotide
  modified_base 7: mod_base = OTHER; note = 2'-O-methyl modified nucleotide
  modified_base 10: mod_base = OTHER; note = 2'-O-methyl modified nucleotide
  modified_base 13: mod_base = OTHER; note = nucleotide with phosphorothioate linkage
  modified_base 17: mod_base = OTHER; note = 2'-O-methyl modified nucleotide
  modified_base 18: mod_base = OTHER; note = 2'-O-methyl modified nucleotide
  modified_base 20: mod_base = OTHER; note = 2'-O-methyl modified nucleotide
  modified_base 21: mod_base = OTHER; note = 2'-O-methyl modified nucleotide
  modified_base 22: mod_base = OTHER; note = 2'-O-methyl modified nucleotide attached to position 1 of SEQ ID NO: 3187 via a L1 linker
ccgttgctacaataaggccgtc

SEQ ID NO: 3093 - RNA, 22 nt, synthetic construct
  source 1..22: mol_type = other RNA
  modified_base 1: mod_base = OTHER; note = 2'-O-methyl modified nucleotide attached to position 37 of SEQ ID NO: 2559 via a L1 linker
  modified_base 2: mod_base = OTHER; note = 2'-O-methyl modified nucleotide
  modified_base 6: mod_base = OTHER; note = 2'-O-methyl modified nucleotide
  modified_base 7: mod_base = OTHER; note = 2'-O-methyl modified nucleotide
  modified_base 10: mod_base = OTHER; note = 2'-O-methyl modified nucleotide
  modified_base 13: mod_base = OTHER; note = nucleotide with phosphorothioate linkage
  modified_base 17: mod_base = OTHER; note = 2'-O-methyl modified nucleotide
  modified_base 18: mod_base = OTHER; note = 2'-O-methyl modified nucleotide
  modified_base 20: mod_base = OTHER; note = 2'-O-methyl modified nucleotide
  modified_base 21: mod_base = OTHER; note = 2'-O-methyl modified nucleotide
  modified_base 22: mod_base = OTHER; note = 2'-O-methyl modified nucleotide attached to position 1 of SEQ ID NO: 3188 via a L1 linker
ccgttgctacaataaggccgtc

SEQ ID NO: 3094 - RNA, 22 nt, synthetic construct
  source 1..22: mol_type = other RNA
  modified_base 1: mod_base = OTHER; note = 2'-O-methyl modified nucleotide attached to position 37 of SEQ ID NO: 2560 via a L1 linker
  modified_base 2: mod_base = OTHER; note = 2'-O-methyl modified nucleotide
  modified_base 6: mod_base = OTHER; note = 2'-O-methyl modified nucleotide
  modified_base 7: mod_base = OTHER; note = 2'-O-methyl modified nucleotide
  modified_base 10: mod_base = OTHER; note = 2'-O-methyl modified nucleotide
  modified_base 13: mod_base = OTHER; note = nucleotide with phosphorothioate linkage
  modified_base 17: mod_base = OTHER; note = 2'-O-methyl modified nucleotide
  modified_base 18: mod_base = OTHER; note = 2'-O-methyl modified nucleotide
  modified_base 20: mod_base = OTHER; note = 2'-O-methyl modified nucleotide
  modified_base 21: mod_base = OTHER; note = 2'-O-methyl modified nucleotide
  modified_base 22: mod_base = OTHER; note = 2'-O-methyl modified nucleotide attached to position 1 of SEQ ID NO: 3189 via a L1 linker
ccgttgctacaataaggccgtc

SEQ ID NO: 3095 - RNA, 22 nt, synthetic construct
  source 1..22: mol_type = other RNA
  modified_base 1: mod_base = OTHER; note = 2'-O-methyl modified nucleotide attached to position 37 of SEQ ID NO: 2561 via a L1 linker
  modified_base 2: mod_base = OTHER; note = 2'-O-methyl modified nucleotide
  modified_base 6: mod_base = OTHER; note = 2'-O-methyl modified nucleotide
  modified_base 7: mod_base = OTHER; note = 2'-O-methyl modified nucleotide
  modified_base 10: mod_base = OTHER; note = 2'-O-methyl modified nucleotide
  modified_base 13: mod_base = OTHER; note = nucleotide with phosphorothioate linkage
  modified_base 17: mod_base = OTHER; note = 2'-O-methyl modified nucleotide
  modified_base 18: mod_base = OTHER; note = 2'-O-methyl modified nucleotide
  modified_base 20: mod_base = OTHER; note = 2'-O-methyl modified nucleotide
  modified_base 21: mod_base = OTHER; note = 2'-O-methyl modified nucleotide
  modified_base 22: mod_base = OTHER; note = 2'-O-methyl modified nucleotide attached to position 1 of SEQ ID NO: 3190 via a L1 linker
ccgttgctacaataaggccgtc

SEQ ID NO: 3096 - RNA, 22 nt, synthetic construct
  source 1..22: mol_type = other RNA
  modified_base 1: mod_base = OTHER; note = 2'-O-methyl modified nucleotide attached to position 37 of SEQ ID NO: 2562 via a L1 linker
  modified_base 2: mod_base = OTHER; note = 2'-O-methyl modified nucleotide
  modified_base 6: mod_base = OTHER; note = 2'-O-methyl modified nucleotide
  modified_base 7: mod_base = OTHER; note = 2'-O-methyl modified nucleotide
  modified_base 10: mod_base = OTHER; note = 2'-O-methyl modified nucleotide
  modified_base 13: mod_base = OTHER; note = nucleotide with phosphorothioate linkage
  modified_base 17: mod_base = OTHER; note = 2'-O-methyl modified nucleotide
  modified_base 18: mod_base = OTHER; note = 2'-O-methyl modified nucleotide
  modified_base 20: mod_base = OTHER; note = 2'-O-methyl modified nucleotide
  modified_base 21: mod_base = OTHER; note = 2'-O-methyl modified nucleotide
  modified_base 22: mod_base = OTHER; note = 2'-O-methyl modified nucleotide attached to position 1 of SEQ ID NO: 3191 via a L1 linker
ccgttgctacaataaggccgtc

SEQ ID NO: 3097 - RNA, 22 nt, synthetic construct
  source 1..22: mol_type = other RNA
  modified_base 1: mod_base = OTHER; note = 2'-O-methyl modified nucleotide attached to position 37 of SEQ ID NO: 2563 via a L1 linker
  modified_base 2: mod_base = OTHER; note = 2'-O-methyl modified nucleotide
  modified_base 6: mod_base = OTHER; note = 2'-O-methyl modified nucleotide
  modified_base 7: mod_base = OTHER; note = 2'-O-methyl modified nucleotide
  modified_base 10: mod_base = OTHER; note = 2'-O-methyl modified nucleotide
  modified_base 13: mod_base = OTHER; note = nucleotide with phosphorothioate linkage
  modified_base 17: mod_base = OTHER; note = 2'-O-methyl modified nucleotide
  modified_base 18: mod_base = OTHER; note = 2'-O-methyl modified nucleotide
  modified_base 20: mod_base = OTHER; note = 2'-O-methyl modified nucleotide
  modified_base 21: mod_base = OTHER; note = 2'-O-methyl modified nucleotide
  modified_base 22: mod_base = OTHER; note = 2'-O-methyl modified nucleotide attached to position 1 of SEQ ID NO: 3192 via a L1 linker
ccgttgctacaataaggccgtc

SEQ ID NO: 3098 - RNA, 22 nt, synthetic construct
  source 1..22: mol_type = other RNA
  modified_base 1: mod_base = OTHER; note = 2'-O-methyl modified nucleotide attached to position 37 of SEQ ID NO: 2564 via a L1 linker
  modified_base 2: mod_base = OTHER; note = 2'-O-methyl modified nucleotide
  modified_base 6: mod_base = OTHER; note = 2'-O-methyl modified nucleotide
  modified_base 7: mod_base = OTHER; note = 2'-O-methyl modified nucleotide
  modified_base 10: mod_base = OTHER; note = 2'-O-methyl modified nucleotide
  modified_base 13: mod_base = OTHER; note = nucleotide with phosphorothioate linkage
  modified_base 17: mod_base = OTHER; note = 2'-O-methyl modified nucleotide
  modified_base 18: mod_base = OTHER; note = 2'-O-methyl modified nucleotide
  modified_base 20: mod_base = OTHER; note = 2'-O-methyl modified nucleotide
  modified_base 21: mod_base = OTHER; note = 2'-O-methyl modified nucleotide
  modified_base 22: mod_base = OTHER; note = 2'-O-methyl modified nucleotide attached to position 1 of SEQ ID NO: 3193 via a L1 linker
ccgttgctacaataaggccgtc

SEQ ID NO: 3099 - RNA, 22 nt, synthetic construct
  source 1..22: mol_type = other RNA
  modified_base 1: mod_base = OTHER; note = 2'-O-methyl modified nucleotide attached to position 37 of SEQ ID NO: 2565 via a L1 linker
  modified_base 2: mod_base = OTHER; note = 2'-O-methyl modified nucleotide
  modified_base 6: mod_base = OTHER; note = 2'-O-methyl modified nucleotide
  modified_base 7: mod_base = OTHER; note = 2'-O-methyl modified nucleotide
  modified_base 10: mod_base = OTHER; note = 2'-O-methyl modified nucleotide
  modified_base 13: mod_base = OTHER; note = nucleotide with phosphorothioate linkage
  modified_base 17: mod_base = OTHER; note = 2'-O-methyl modified nucleotide
  modified_base 18: mod_base = OTHER; note = 2'-O-methyl modified nucleotide
  modified_base 20: mod_base = OTHER; note = 2'-O-methyl modified nucleotide
  modified_base 21: mod_base = OTHER; note = 2'-O-methyl modified nucleotide
  modified_base 22: mod_base = OTHER; note = 2'-O-methyl modified nucleotide attached to position 1 of SEQ ID NO: 3194 via a L1 linker
ccgttgctacaataaggccgtc

SEQ ID NO: 3100 - RNA, 22 nt, synthetic construct
  source 1..22: mol_type = other RNA
  modified_base 1: mod_base = OTHER; note = 2'-O-methyl modified nucleotide attached to position 37 of SEQ ID NO: 2566 via a L1 linker
  modified_base 2: mod_base = OTHER; note = 2'-O-methyl modified nucleotide
  modified_base 6: mod_base = OTHER; note = 2'-O-methyl modified nucleotide
  modified_base 7: mod_base = OTHER; note = 2'-O-methyl modified nucleotide
  modified_base 10: mod_base = OTHER; note = 2'-O-methyl modified nucleotide
  modified_base 13: mod_base = OTHER; note = nucleotide with phosphorothioate linkage
  modified_base 17: mod_base = OTHER; note = 2'-O-methyl modified nucleotide
  modified_base 18: mod_base = OTHER; note = 2'-O-methyl modified nucleotide
  modified_base 20: mod_base = OTHER; note = 2'-O-methyl modified nucleotide
  modified_base 21: mod_base = OTHER; note = 2'-O-methyl modified nucleotide
  modified_base 22: mod_base = OTHER; note = 2'-O-methyl modified nucleotide attached to position 1 of SEQ ID NO: 3195 via a L1 linker
ccgttgctacaataaggccgtc

SEQ ID NO: 3101 - RNA, 22 nt, synthetic construct
  source 1..22: mol_type = other RNA
  modified_base 1: mod_base = OTHER; note = 2'-O-methyl modified nucleotide attached to position 37 of SEQ ID NO: 2567 via a L1 linker
  modified_base 2: mod_base = OTHER; note = 2'-O-methyl modified nucleotide
  modified_base 6: mod_base = OTHER; note = 2'-O-methyl modified nucleotide
  modified_base 7: mod_base = OTHER; note = 2'-O-methyl modified nucleotide
  modified_base 10: mod_base = OTHER; note = 2'-O-methyl modified nucleotide
  modified_base 13: mod_base = OTHER; note = nucleotide with phosphorothioate linkage
  modified_base 17: mod_base = OTHER; note = 2'-O-methyl modified nucleotide
  modified_base 18: mod_base = OTHER; note = 2'-O-methyl modified nucleotide
  modified_base 20: mod_base = OTHER; note = 2'-O-methyl modified nucleotide
  modified_base 21: mod_base = OTHER; note = 2'-O-methyl modified nucleotide
  modified_base 22: mod_base = OTHER; note = 2'-O-methyl modified nucleotide attached to position 1 of SEQ ID NO: 3196 via a L1 linker
ccgttgctacaataaggccgtc

SEQ ID NO: 3102 - RNA, 22 nt, synthetic construct
  source 1..22: mol_type = other RNA
  modified_base 1: mod_base = OTHER; note = 2'-O-methyl modified nucleotide attached to position 37 of SEQ ID NO: 2568 via a L1 linker
  modified_base 2: mod_base = OTHER; note = 2'-O-methyl modified nucleotide
  modified_base 6: mod_base = OTHER; note = 2'-O-methyl modified nucleotide
  modified_base 7: mod_base = OTHER; note = 2'-O-methyl modified nucleotide
  modified_base 10: mod_base = OTHER; note = 2'-O-methyl modified nucleotide
  modified_base 13: mod_base = OTHER; note = nucleotide with phosphorothioate linkage
  modified_base 17: mod_base = OTHER; note = 2'-O-methyl modified nucleotide
  modified_base 18: mod_base = OTHER; note = 2'-O-methyl modified nucleotide
  modified_base 20: mod_base = OTHER; note = 2'-O-methyl modified nucleotide
  modified_base 21: mod_base = OTHER; note = 2'-O-methyl modified nucleotide
  modified_base 22: mod_base = OTHER; note = 2'-O-methyl modified nucleotide attached to position 1 of SEQ ID NO: 3197 via a L1 linker
ccgttgctacaataaggccgtc

SEQ ID NO: 3103 - RNA, 22 nt, synthetic construct
  source 1..22: mol_type = other RNA
  modified_base 1: mod_base = OTHER; note = 2'-O-methyl modified nucleotide attached to position 37 of SEQ ID NO: 2569 via a L1 linker
  modified_base 2: mod_base = OTHER; note = 2'-O-methyl modified nucleotide
  modified_base 6: mod_base = OTHER; note = 2'-O-methyl modified nucleotide
  modified_base 7: mod_base = OTHER; note = 2'-O-methyl modified nucleotide
  modified_base 10: mod_base = OTHER; note = 2'-O-methyl modified nucleotide
  modified_base 13: mod_base = OTHER; note = nucleotide with phosphorothioate linkage
  modified_base 17: mod_base = OTHER; note = 2'-O-methyl modified nucleotide
  modified_base 18: mod_base = OTHER; note = 2'-O-methyl modified nucleotide
  modified_base 20: mod_base = OTHER; note = 2'-O-methyl modified nucleotide
  modified_base 21: mod_base = OTHER; note = 2'-O-methyl modified nucleotide
  modified_base 22: mod_base = OTHER; note = 2'-O-methyl modified nucleotide attached to position 1 of SEQ ID NO: 3198 via a L1 linker
ccgttgctacaataaggccgtc

SEQ ID NO: 3104 - RNA, 22 nt, synthetic construct
  source 1..22: mol_type = other RNA
  modified_base 1: mod_base = OTHER; note = 2'-O-methyl modified nucleotide attached to position 37 of SEQ ID NO: 2570 via a L1 linker
  modified_base 2: mod_base = OTHER; note = 2'-O-methyl modified nucleotide
  modified_base 6: mod_base = OTHER; note = 2'-O-methyl modified nucleotide
  modified_base 7: mod_base = OTHER; note = 2'-O-methyl modified nucleotide
  modified_base 10: mod_base = OTHER; note = 2'-O-methyl modified nucleotide
  modified_base 13: mod_base = OTHER; note = nucleotide with phosphorothioate linkage
  modified_base 17: mod_base = OTHER; note = 2'-O-methyl modified nucleotide
  modified_base 18: mod_base = OTHER; note = 2'-O-methyl modified nucleotide
  modified_base 20: mod_base = OTHER; note = 2'-O-methyl modified nucleotide
  modified_base 21: mod_base = OTHER; note = 2'-O-methyl modified nucleotide
  modified_base 22: mod_base = OTHER; note = 2'-O-methyl modified nucleotide attached to position 1 of SEQ ID NO: 3199 via a L1 linker
ccgttgctacaataaggccgtc

SEQ ID NO: 3105 - RNA, 22 nt, synthetic construct
  source 1..22: mol_type = other RNA
  modified_base 1: mod_base = OTHER; note = 2'-O-methyl modified nucleotide attached to position 37 of SEQ ID NO: 2571 via a L1 linker
  modified_base 2: mod_base = OTHER; note = 2'-O-methyl modified nucleotide
  modified_base 6: mod_base = OTHER; note = 2'-O-methyl modified nucleotide
  modified_base 7: mod_base = OTHER; note = 2'-O-methyl modified nucleotide
  modified_base 10: mod_base = OTHER; note = 2'-O-methyl modified nucleotide
  modified_base 13: mod_base = OTHER; note = nucleotide with phosphorothioate linkage
  modified_base 17: mod_base = OTHER; note = 2'-O-methyl modified nucleotide
  modified_base 18: mod_base = OTHER; note = 2'-O-methyl modified nucleotide
  modified_base 20: mod_base = OTHER; note = 2'-O-methyl modified nucleotide
  modified_base 21: mod_base = OTHER; note = 2'-O-methyl modified nucleotide
  modified_base 22: mod_base = OTHER; note = 2'-O-methyl modified nucleotide attached to position 1 of SEQ ID NO: 3200 via a L1 linker
ccgttgctacaataaggccgtc

SEQ ID NO: 3106 - RNA, 22 nt, synthetic construct
  source 1..22: mol_type = other RNA
  modified_base 1: mod_base = OTHER; note = 2'-O-methyl modified nucleotide attached to position 37 of SEQ ID NO: 2572 via a L1 linker
  modified_base 2: mod_base = OTHER; note = 2'-O-methyl modified nucleotide
  modified_base 6: mod_base = OTHER; note = 2'-O-methyl modified nucleotide
  modified_base 7: mod_base = OTHER; note = 2'-O-methyl modified nucleotide
  modified_base 10: mod_base = OTHER; note = 2'-O-methyl modified nucleotide
  modified_base 13: mod_base = OTHER; note = nucleotide with phosphorothioate linkage
  modified_base 17: mod_base = OTHER; note = 2'-O-methyl modified nucleotide
  modified_base 18: mod_base = OTHER; note = 2'-O-methyl modified nucleotide
  modified_base 20: mod_base = OTHER; note = 2'-O-methyl modified nucleotide
  modified_base 21: mod_base = OTHER; note = 2'-O-methyl modified nucleotide
  modified_base 22: mod_base = OTHER; note = 2'-O-methyl modified nucleotide attached to position 1 of SEQ ID NO: 3201 via a L1 linker
ccgttgctacaataaggccgtc

SEQ ID NO: 3107 - RNA, 22 nt, synthetic construct
  source 1..22: mol_type = other RNA
  modified_base 1: mod_base = OTHER; note = 2'-O-methyl modified nucleotide attached to position 37 of SEQ ID NO: 2573 via a L1 linker
  modified_base 2: mod_base = OTHER; note = 2'-O-methyl modified nucleotide
  modified_base 6: mod_base = OTHER; note = 2'-O-methyl modified nucleotide
  modified_base 7: mod_base = OTHER; note = 2'-O-methyl modified nucleotide
  modified_base 10: mod_base = OTHER; note = 2'-O-methyl modified nucleotide
  modified_base 13: mod_base = OTHER; note = nucleotide with phosphorothioate linkage
  modified_base 17: mod_base = OTHER; note = 2'-O-methyl modified nucleotide
  modified_base 18: mod_base = OTHER; note = 2'-O-methyl modified nucleotide
  modified_base 20: mod_base = OTHER; note = 2'-O-methyl modified nucleotide
  modified_base 21: mod_base = OTHER; note = 2'-O-methyl modified nucleotide
  modified_base 22: mod_base = OTHER; note = 2'-O-methyl modified nucleotide attached to position 1 of SEQ ID NO: 3202 via a L1 linker
ccgttgctacaataaggccgtc

SEQ ID NO: 3108 - RNA, 22 nt, synthetic construct
  source 1..22: mol_type = other RNA
  modified_base 1: mod_base = OTHER; note = 2'-O-methyl modified nucleotide attached to position 37 of SEQ ID NO: 2574 via a L1 linker
  modified_base 2: mod_base = OTHER; note = 2'-O-methyl modified nucleotide
  modified_base 6: mod_base = OTHER; note = 2'-O-methyl modified nucleotide
  modified_base 7: mod_base = OTHER; note = 2'-O-methyl modified nucleotide
  modified_base 10: mod_base = OTHER; note = 2'-O-methyl modified nucleotide
  modified_base 13: mod_base = OTHER; note = nucleotide with phosphorothioate linkage
  modified_base 17: mod_base = OTHER; note = 2'-O-methyl modified nucleotide
  modified_base 18: mod_base = OTHER; note = 2'-O-methyl modified nucleotide
  modified_base 20: mod_base = OTHER; note = 2'-O-methyl modified nucleotide
  modified_base 21: mod_base = OTHER; note = 2'-O-methyl modified nucleotide
  modified_base 22: mod_base = OTHER; note = 2'-O-methyl modified nucleotide attached to position 1 of SEQ ID NO: 3203 via a L1 linker
ccgttgctacaataaggccgtc

SEQ ID NO: 3109 - RNA, 22 nt, synthetic construct
  source 1..22: mol_type = other RNA
  modified_base 1: mod_base = OTHER; note = 2'-O-methyl modified nucleotide attached to position 37 of SEQ ID NO: 2575 via a L1 linker
  modified_base 2: mod_base = OTHER; note = 2'-O-methyl modified nucleotide
  modified_base 6: mod_base = OTHER; note = 2'-O-methyl modified nucleotide
  modified_base 7: mod_base = OTHER; note = 2'-O-methyl modified nucleotide
  modified_base 10: mod_base = OTHER; note = 2'-O-methyl modified nucleotide
  modified_base 13: mod_base = OTHER; note = nucleotide with phosphorothioate linkage
  modified_base 17: mod_base = OTHER; note = 2'-O-methyl modified nucleotide
  modified_base 18: mod_base = OTHER; note = 2'-O-methyl modified nucleotide
  modified_base 20: mod_base = OTHER; note = 2'-O-methyl modified nucleotide
  modified_base 21: mod_base = OTHER; note = 2'-O-methyl modified nucleotide
  modified_base 22: mod_base = OTHER; note = 2'-O-methyl modified nucleotide attached to position 1 of SEQ ID NO: 3204 via a L1 linker
ccgttgctacaataaggccgtc

SEQ ID NO: 3110 - RNA, 22 nt, synthetic construct
  source 1..22: mol_type = other RNA
  modified_base 1: mod_base = OTHER; note = 2'-O-methyl modified nucleotide attached to position 37 of SEQ ID NO: 2576 via a L1 linker
  modified_base 2: mod_base = OTHER; note = 2'-O-methyl modified nucleotide
  modified_base 6: mod_base = OTHER; note = 2'-O-methyl modified nucleotide
  modified_base 7: mod_base = OTHER; note = 2'-O-methyl modified nucleotide
  modified_base 10: mod_base = OTHER; note = 2'-O-methyl modified nucleotide
  modified_base 13: mod_base = OTHER; note = nucleotide with phosphorothioate linkage
  modified_base 17: mod_base = OTHER; note = 2'-O-methyl modified nucleotide
  modified_base 18: mod_base = OTHER; note = 2'-O-methyl modified nucleotide
  modified_base 20: mod_base = OTHER; note = 2'-O-methyl modified nucleotide
  modified_base 21: mod_base = OTHER; note = 2'-O-methyl modified nucleotide
  modified_base 22: mod_base = OTHER; note = 2'-O-methyl modified nucleotide attached to position 1 of SEQ ID NO: 3205 via a L1 linker
ccgttgctacaataaggccgtc

SEQ ID NO: 3111 - RNA, 21 nt, synthetic construct
  source 1..21: mol_type = other RNA
  modified_base 1: mod_base = OTHER; note = 2'-O-methyl modified nucleotide attached to position 22 of SEQ ID NO: 3016 via a L1 linker
  modified_base 2: mod_base = OTHER; note = 2'-O-methyl modified nucleotide
  modified_base 3: mod_base = OTHER; note = 2'-O-methyl modified nucleotide
  modified_base 8: mod_base = OTHER; note = 2'-O-methyl modified nucleotide
  modified_base 10: mod_base = OTHER; note = 2'-O-methyl modified nucleotide
  modified_base 13: mod_base = OTHER; note = 2'-O-methyl modified nucleotide
  modified_base 19: mod_base = OTHER; note = 2'-O-methyl modified nucleotide
  modified_base 20: mod_base = OTHER; note = 2'-O-methyl modified nucleotide
  modified_base 21: mod_base = OTHER; note = nucleotide attached to ggcaucguu via a L1 linker
gatgtgccgcaacgctctgcc

SEQ ID NO: 3112 - RNA, 21 nt, synthetic construct
  source 1..21: mol_type = other RNA
  modified_base 1: mod_base = OTHER; note = 2'-O-methyl modified nucleotide attached to position 22 of SEQ ID NO: 3017 via a L1 linker
  modified_base 2: mod_base = OTHER; note = 2'-O-methyl modified nucleotide
  modified_base 3: mod_base = OTHER; note = 2'-O-methyl modified nucleotide
  modified_base 8: mod_base = OTHER; note = 2'-O-methyl modified nucleotide
  modified_base 10: mod_base = OTHER; note = 2'-O-methyl modified nucleotide
  modified_base 13: mod_base = OTHER; note = 2'-O-methyl modified nucleotide
  modified_base 19: mod_base = OTHER; note = 2'-O-methyl modified nucleotide
  modified_base 20: mod_base = OTHER; note = 2'-O-methyl modified nucleotide
  modified_base 21: mod_base = OTHER; note = nucleotide attached to ggcaucguu via a L1 linker
gatgtgccgcaacgctctgcc

SEQ ID NO: 3113 - RNA, 21 nt, synthetic construct
  source 1..21: mol_type = other RNA
  modified_base 1: mod_base = OTHER; note = 2'-O-methyl modified nucleotide attached to position 22 of SEQ ID NO: 3018 via a L1 linker
  modified_base 2: mod_base = OTHER; note = 2'-O-methyl modified nucleotide
  modified_base 3: mod_base = OTHER; note = 2'-O-methyl modified nucleotide
  modified_base 8: mod_base = OTHER; note = 2'-O-methyl modified nucleotide
  modified_base 10: mod_base = OTHER; note = 2'-O-methyl modified nucleotide
  modified_base 13: mod_base = OTHER; note = 2'-O-methyl modified nucleotide
  modified_base 19: mod_base = OTHER; note = 2'-O-methyl modified nucleotide
  modified_base 20: mod_base = OTHER; note = 2'-O-methyl modified nucleotide
  modified_base 21: mod_base = OTHER; note = nucleotide attached to ggcaucguu via a L1 linker
gatgtgccgcaacgctctgcc

SEQ ID NO: 3114 - RNA, 21 nt, synthetic construct
  source 1..21: mol_type = other RNA
  modified_base 1: mod_base = OTHER; note = 2'-O-methyl modified nucleotide attached to position 22 of SEQ ID NO: 3019 via a L1 linker
  modified_base 2: mod_base = OTHER; note = 2'-O-methyl modified nucleotide
  modified_base 3: mod_base = OTHER; note = 2'-O-methyl modified nucleotide
  modified_base 8: mod_base = OTHER; note = 2'-O-methyl modified nucleotide
  modified_base 10: mod_base = OTHER; note = 2'-O-methyl modified nucleotide
  modified_base 13: mod_base = OTHER; note = 2'-O-methyl modified nucleotide
  modified_base 19: mod_base = OTHER; note = 2'-O-methyl modified nucleotide
  modified_base 20: mod_base = OTHER; note = 2'-O-methyl modified nucleotide
  modified_base 21: mod_base = OTHER; note = nucleotide attached to ggcaucguu via a L1 linker
gatgtgccgcaacgctctgcc

SEQ ID NO: 3115 - RNA, 21 nt, synthetic construct
  source 1..21: mol_type = other RNA
  modified_base 1: mod_base = OTHER; note = 2'-O-methyl modified nucleotide attached to position 22 of SEQ ID NO: 3020 via a L1 linker
  modified_base 2: mod_base = OTHER; note = 2'-O-methyl modified nucleotide
  modified_base 3: mod_base = OTHER; note = 2'-O-methyl modified nucleotide
  modified_base 8: mod_base = OTHER; note = 2'-O-methyl modified nucleotide
  modified_base 10: mod_base = OTHER; note = 2'-O-methyl modified nucleotide
  modified_base 13: mod_base = OTHER; note = 2'-O-methyl modified nucleotide
  modified_base 19: mod_base = OTHER; note = 2'-O-methyl modified nucleotide
  modified_base 20: mod_base = OTHER; note = 2'-O-methyl modified nucleotide
  modified_base 21: mod_base = OTHER; note = nucleotide attached to ggcaucguu via a L1 linker
gatgtgccgcaacgctctgcc

SEQ ID NO: 3116 - RNA, 21 nt, synthetic construct
  source 1..21: mol_type = other RNA
  modified_base 1: mod_base = OTHER; note = 2'-O-methyl modified nucleotide attached to position 22 of SEQ ID NO: 3021 via a L1 linker
  modified_base 2: mod_base = OTHER; note = 2'-O-methyl modified nucleotide
  modified_base 3: mod_base = OTHER; note = 2'-O-methyl modified nucleotide
  modified_base 8: mod_base = OTHER; note = 2'-O-methyl modified nucleotide
  modified_base 10: mod_base = OTHER; note = 2'-O-methyl modified nucleotide
  modified_base 13: mod_base = OTHER; note = 2'-O-methyl modified nucleotide
  modified_base 19: mod_base = OTHER; note = 2'-O-methyl modified nucleotide
  modified_base 20: mod_base = OTHER; note = 2'-O-methyl modified nucleotide
  modified_base 21: mod_base = OTHER; note = nucleotide attached to ggcaucguu via a L1 linker
gatgtgccgcaacgctctgcc

SEQ ID NO: 3117 - RNA, 21 nt, synthetic construct
  source 1..21: mol_type = other RNA
  modified_base 1: mod_base = OTHER; note = 2'-O-methyl modified nucleotide attached to position 22 of SEQ ID NO: 3022 via a L1 linker
  modified_base 2: mod_base = OTHER; note = 2'-O-methyl modified nucleotide
  modified_base 3: mod_base = OTHER; note = 2'-O-methyl modified nucleotide
  modified_base 8: mod_base = OTHER; note = 2'-O-methyl modified nucleotide
  modified_base 10: mod_base = OTHER; note = 2'-O-methyl modified nucleotide
  modified_base 13: mod_base = OTHER; note = 2'-O-methyl modified nucleotide
  modified_base 19: mod_base = OTHER; note = 2'-O-methyl modified nucleotide
  modified_base 20: mod_base = OTHER; note = 2'-O-methyl modified nucleotide
  modified_base 21: mod_base = OTHER; note = nucleotide attached to ggcaucguu via a L1 linker
gatgtgccgcaacgctctgcc

SEQ ID NO: 3118 - RNA, 21 nt, synthetic construct
  source 1..21: mol_type = other RNA
  modified_base 1: mod_base = OTHER; note = 2'-O-methyl modified nucleotide attached to position 22 of SEQ ID NO: 3023 via a L1 linker
  modified_base 2: mod_base = OTHER; note = 2'-O-methyl modified nucleotide
  modified_base 3: mod_base = OTHER; note = 2'-O-methyl modified nucleotide
  modified_base 8: mod_base = OTHER; note = 2'-O-methyl modified nucleotide
  modified_base 10: mod_base = OTHER; note = 2'-O-methyl modified nucleotide
  modified_base 13: mod_base = OTHER; note = 2'-O-methyl modified nucleotide
  modified_base 19: mod_base = OTHER; note = 2'-O-methyl modified nucleotide
  modified_base 20: mod_base = OTHER; note = 2'-O-methyl modified nucleotide
  modified_base 21: mod_base = OTHER; note = nucleotide attached to ggcaucguu via a L1 linker
gatgtgccgcaacgctctgcc

SEQ ID NO: 3119 - RNA, 21 nt, synthetic construct
  source 1..21: mol_type = other RNA
  modified_base 1: mod_base = OTHER; note = 2'-O-methyl modified nucleotide attached to position 22 of SEQ ID NO: 3024 via a L1 linker
  modified_base 2: mod_base = OTHER; note = 2'-O-methyl modified nucleotide
  modified_base 3: mod_base = OTHER; note = 2'-O-methyl modified nucleotide
  modified_base 8: mod_base = OTHER; note = 2'-O-methyl modified nucleotide
  modified_base 10: mod_base = OTHER; note = 2'-O-methyl modified nucleotide
  modified_base 13: mod_base = OTHER; note = 2'-O-methyl modified nucleotide
  modified_base 19: mod_base = OTHER; note = 2'-O-methyl modified nucleotide
  modified_base 20: mod_base = OTHER; note = 2'-O-methyl modified nucleotide
  modified_base 21: mod_base = OTHER; note = nucleotide attached to ggcaucguu via a L1 linker
gatgtgccgcaacgctctgcc

SEQ ID NO: 3120 - RNA, 21 nt, synthetic construct
  source 1..21: mol_type = other RNA
  modified_base 1: mod_base = OTHER; note = 2'-O-methyl modified nucleotide attached to position 22 of SEQ ID NO: 3025 via a L1 linker
  modified_base 2: mod_base = OTHER; note = 2'-O-methyl modified nucleotide
  modified_base 3: mod_base = OTHER; note = 2'-O-methyl modified nucleotide
  modified_base 8: mod_base = OTHER; note = 2'-O-methyl modified nucleotide
  modified_base 10: mod_base = OTHER; note = 2'-O-methyl modified nucleotide
  modified_base 13: mod_base = OTHER; note = 2'-O-methyl modified nucleotide
  modified_base 19: mod_base = OTHER; note = 2'-O-methyl modified nucleotide
  modified_base 20: mod_base = OTHER; note = 2'-O-methyl modified nucleotide
  modified_base 21: mod_base = OTHER; note = nucleotide attached to ggcaucguu via a L1 linker
gatgtgccgcaacgctctgcc

SEQ ID NO: 3121 - RNA, 21 nt, synthetic construct
  source 1..21: mol_type = other RNA
  modified_base 1: mod_base = OTHER; note = 2'-O-methyl modified nucleotide attached to position 22 of SEQ ID NO: 3026 via a L1 linker
  modified_base 2: mod_base = OTHER; note = 2'-O-methyl modified nucleotide
  modified_base 3: mod_base = OTHER; note = 2'-O-methyl modified nucleotide
  modified_base 8: mod_base = OTHER; note = 2'-O-methyl modified nucleotide
  modified_base 10: mod_base = OTHER; note = 2'-O-methyl modified nucleotide
  modified_base 13: mod_base = OTHER; note = 2'-O-methyl modified nucleotide
  modified_base 19: mod_base = OTHER; note = 2'-O-methyl modified nucleotide
  modified_base 20: mod_base = OTHER; note = 2'-O-methyl modified nucleotide
  modified_base 21: mod_base = OTHER; note = nucleotide attached to ggcaucguu via a L1 linker
gatgtgccgcaacgctctgcc

SEQ ID NO: 3122 - RNA, 21 nt, synthetic construct
  source 1..21: mol_type = other RNA
  modified_base 1: mod_base = OTHER; note = 2'-O-methyl modified nucleotide attached to position 22 of SEQ ID NO: 3027 via a L1 linker
  modified_base 2: mod_base = OTHER; note = 2'-O-methyl modified nucleotide
  modified_base 3: mod_base = OTHER; note = 2'-O-methyl modified nucleotide
  modified_base 8: mod_base = OTHER; note = 2'-O-methyl modified nucleotide
  modified_base 10: mod_base = OTHER; note = 2'-O-methyl modified nucleotide
  modified_base 13: mod_base = OTHER; note = 2'-O-methyl modified nucleotide
  modified_base 19: mod_base = OTHER; note = 2'-O-methyl modified nucleotide
  modified_base 20: mod_base = OTHER; note = 2'-O-methyl modified nucleotide
  modified_base 21: mod_base = OTHER; note = nucleotide attached to ggcaucguu via a L1 linker
gatgtgccgcaacgctctgcc

SEQ ID NO: 3123 - RNA, 21 nt, synthetic construct
  source 1..21: mol_type = other RNA
  modified_base 1: mod_base = OTHER; note = 2'-O-methyl modified nucleotide attached to position 22 of SEQ ID NO: 3028 via a L1 linker
  modified_base 2: mod_base = OTHER; note = 2'-O-methyl modified nucleotide
  modified_base 3: mod_base = OTHER; note = 2'-O-methyl modified nucleotide
  modified_base 8: mod_base = OTHER; note = 2'-O-methyl modified nucleotide
  modified_base 10: mod_base = OTHER; note = 2'-O-methyl modified nucleotide
  modified_base 13: mod_base = OTHER; note = 2'-O-methyl modified nucleotide
  modified_base 19: mod_base = OTHER; note = 2'-O-methyl modified nucleotide
  modified_base 20: mod_base = OTHER; note = 2'-O-methyl modified nucleotide
  modified_base 21: mod_base = OTHER; note = nucleotide attached to ggcaucguu via a L1 linker
gatgtgccgcaacgctctgcc

SEQ ID NO: 3124 - RNA, 21 nt, synthetic construct
  source 1..21: mol_type = other RNA
  modified_base 1: mod_base = OTHER; note = 2'-O-methyl modified nucleotide attached to position 22 of SEQ ID NO: 3029 via a L1 linker
  modified_base 2: mod_base = OTHER; note = 2'-O-methyl modified nucleotide
  modified_base 3: mod_base = OTHER; note = 2'-O-methyl modified nucleotide
  modified_base 8: mod_base = OTHER; note = 2'-O-methyl modified nucleotide
  modified_base 10: mod_base = OTHER; note = 2'-O-methyl modified nucleotide
  modified_base 13: mod_base = OTHER; note = 2'-O-methyl modified nucleotide
  modified_base 19: mod_base = OTHER; note = 2'-O-methyl modified nucleotide
  modified_base 20: mod_base = OTHER; note = 2'-O-methyl modified nucleotide
  modified_base 21: mod_base = OTHER; note = nucleotide attached to ggcaucguu via a L1 linker
gatgtgccgcaacgctctgcc

SEQ ID NO: 3125 - RNA, 21 nt, synthetic construct
  source 1..21: mol_type = other RNA
  modified_base 1: mod_base = OTHER; note = 2'-O-methyl modified nucleotide attached to position 22 of SEQ ID NO: 3030 via a L1 linker
  modified_base 2: mod_base = OTHER; note = 2'-O-methyl modified nucleotide
  modified_base 3: mod_base = OTHER; note = 2'-O-methyl modified nucleotide
  modified_base 8: mod_base = OTHER; note = 2'-O-methyl modified nucleotide
  modified_base 10: mod_base = OTHER; note = 2'-O-methyl modified nucleotide
  modified_base 13: mod_base = OTHER; note = 2'-O-methyl modified nucleotide
  modified_base 19: mod_base = OTHER; note = 2'-O-methyl modified nucleotide
  modified_base 20: mod_base = OTHER; note = 2'-O-methyl modified nucleotide
  modified_base 21: mod_base = OTHER; note = nucleotide attached to ggcaucguu via a L1 linker
gatgtgccgcaacgctctgcc

SEQ ID NO: 3126 - RNA, 21 nt, synthetic construct
  source 1..21: mol_type = other RNA
  modified_base 1: mod_base = OTHER; note = 2'-O-methyl modified nucleotide attached to position 22 of SEQ ID NO: 3031 via a L1 linker
  modified_base 2: mod_base = OTHER; note = 2'-O-methyl modified nucleotide
  modified_base 3: mod_base = OTHER; note = 2'-O-methyl modified nucleotide
  modified_base 8: mod_base = OTHER; note = 2'-O-methyl modified nucleotide
  modified_base 10: mod_base = OTHER; note = 2'-O-methyl modified nucleotide
  modified_base 13: mod_base = OTHER; note = 2'-O-methyl modified nucleotide
  modified_base 19: mod_base = OTHER; note = 2'-O-methyl modified nucleotide
  modified_base 20: mod_base = OTHER; note = 2'-O-methyl modified nucleotide
  modified_base 21: mod_base = OTHER; note = nucleotide attached to ggcaucguu via a L1 linker
gatgtgccgcaacgctctgcc

SEQ ID NO: 3127 - RNA, 21 nt, synthetic construct
  source 1..21: mol_type = other RNA
  modified_base 1: mod_base = OTHER; note = 2'-O-methyl modified nucleotide attached to position 22 of SEQ ID NO: 3032 via a L1 linker
  modified_base 2: mod_base = OTHER; note = 2'-O-methyl modified nucleotide
  modified_base 3: mod_base = OTHER; note = 2'-O-methyl modified nucleotide
  modified_base 8: mod_base = OTHER; note = 2'-O-methyl modified nucleotide
  modified_base 10: mod_base = OTHER; note = 2'-O-methyl modified nucleotide
  modified_base 13: mod_base = OTHER; note = 2'-O-methyl modified nucleotide
  modified_base 19: mod_base = OTHER; note = 2'-O-methyl modified nucleotide
  modified_base 20: mod_base = OTHER; note = 2'-O-methyl modified nucleotide
  modified_base 21: mod_base = OTHER; note = nucleotide attached to ggcaucguu via a L1 linker
gatgtgccgcaacgctctgcc

SEQ ID NO: 3128 - RNA, 21 nt, synthetic construct
  source 1..21: mol_type = other RNA
  modified_base 1: mod_base = OTHER; note = 2'-O-methyl modified nucleotide attached to position 22 of SEQ ID NO: 3033 via a L1 linker
  modified_base 2: mod_base = OTHER; note = 2'-O-methyl modified nucleotide
  modified_base 3: mod_base = OTHER; note = 2'-O-methyl modified nucleotide
  modified_base 8: mod_base = OTHER; note = 2'-O-methyl modified nucleotide
  modified_base 10: mod_base = OTHER; note = 2'-O-methyl modified nucleotide
  modified_base 13: mod_base = OTHER; note = 2'-O-methyl modified nucleotide
  modified_base 19: mod_base = OTHER; note = 2'-O-methyl modified nucleotide
  modified_base 20: mod_base = OTHER; note = 2'-O-methyl modified nucleotide
  modified_base 21: mod_base = OTHER; note = nucleotide attached to ggcaucguu via a L1 linker
gatgtgccgcaacgctctgcc

SEQ ID NO: 3129 - RNA, 21 nt, synthetic construct
  source 1..21: mol_type = other RNA
  modified_base 1: mod_base = OTHER; note = 2'-O-methyl modified nucleotide attached to position 22 of SEQ ID NO: 3034 via a L1 linker
  modified_base 2: mod_base = OTHER; note = 2'-O-methyl modified nucleotide
  modified_base 3: mod_base = OTHER; note = 2'-O-methyl modified nucleotide
  modified_base 8: mod_base = OTHER; note = 2'-O-methyl modified nucleotide
  modified_base 10: mod_base = OTHER; note = 2'-O-methyl modified nucleotide
  modified_base 13: mod_base = OTHER; note = 2'-O-methyl modified nucleotide
  modified_base 19: mod_base = OTHER; note = 2'-O-methyl modified nucleotide
  modified_base 20: mod_base = OTHER; note = 2'-O-methyl modified nucleotide
  modified_base 21: mod_base = OTHER; note = nucleotide attached to ggcaucguu via a L1 linker
gatgtgccgcaacgctctgcc

SEQ ID NO: 3130 - RNA, 21 nt, synthetic construct
  source 1..21: mol_type = other RNA
  modified_base 1: mod_base = OTHER; note = 2'-O-methyl modified nucleotide attached to position 22 of SEQ ID NO: 3035 via a L1 linker
  modified_base 2: mod_base = OTHER; note = 2'-O-methyl modified nucleotide
  modified_base 3: mod_base = OTHER; note = 2'-O-methyl modified nucleotide
  modified_base 8: mod_base = OTHER; note = 2'-O-methyl modified nucleotide
  modified_base 10: mod_base = OTHER; note = 2'-O-methyl modified nucleotide
  modified_base 13: mod_base = OTHER; note = 2'-O-methyl modified nucleotide
  modified_base 19: mod_base = OTHER; note = 2'-O-methyl modified nucleotide
  modified_base 20: mod_base = OTHER; note = 2'-O-methyl modified nucleotide
  modified_base 21: mod_base = OTHER; note = nucleotide attached to ggcaucguu via a L1 linker
gatgtgccgcaacgctctgcc

SEQ ID NO: 3131 - RNA, 21 nt, synthetic construct
  source 1..21: mol_type = other RNA
  modified_base 1: mod_base = OTHER; note = 2'-O-methyl modified nucleotide attached to position 22 of SEQ ID NO: 3036 via a L1 linker
  modified_base 2: mod_base = OTHER; note = 2'-O-methyl modified nucleotide
  modified_base 3: mod_base = OTHER; note = 2'-O-methyl modified nucleotide
  modified_base 8: mod_base = OTHER; note = 2'-O-methyl modified nucleotide
  modified_base 10: mod_base = OTHER; note = 2'-O-methyl modified nucleotide
  modified_base 13: mod_base = OTHER; note = 2'-O-methyl modified nucleotide
  modified_base 19: mod_base = OTHER; note = 2'-O-methyl modified nucleotide
  modified_base 20: mod_base = OTHER; note = 2'-O-methyl modified nucleotide
  modified_base 21: mod_base = OTHER; note = nucleotide attached to ggcaucguu via a L1 linker
gatgtgccgcaacgctctgcc

SEQ ID NO: 3132 - RNA, 21 nt, synthetic construct
  source 1..21: mol_type = other RNA
  modified_base 1: mod_base = OTHER; note = 2'-O-methyl modified nucleotide attached to position 22 of SEQ ID NO: 3037 via a L1 linker
  modified_base 2: mod_base = OTHER; note = 2'-O-methyl modified nucleotide
  modified_base 3: mod_base = OTHER; note = 2'-O-methyl modified nucleotide
  modified_base 8: mod_base = OTHER; note = 2'-O-methyl modified nucleotide
  modified_base 10: mod_base = OTHER; note = 2'-O-methyl modified nucleotide
  modified_base 13: mod_base = OTHER; note = 2'-O-methyl modified nucleotide
  modified_base 19: mod_base = OTHER; note = 2'-O-methyl modified nucleotide
  modified_base 20: mod_base = OTHER; note = 2'-O-methyl modified nucleotide
  modified_base 21: mod_base = OTHER; note = nucleotide attached to ggcaucguu via a L1 linker
gatgtgccgcaacgctctgcc

SEQ ID NO: 3133 - RNA, 21 nt, synthetic construct
  source 1..21: mol_type = other RNA
  modified_base 1: mod_base = OTHER; note = 2'-O-methyl modified nucleotide attached to position 22 of SEQ ID NO: 3038 via a L1 linker
  modified_base 2: mod_base = OTHER; note = 2'-O-methyl modified nucleotide
  modified_base 3: mod_base = OTHER; note = 2'-O-methyl modified nucleotide
  modified_base 8: mod_base = OTHER; note = 2'-O-methyl modified nucleotide
  modified_base 10: mod_base = OTHER; note = 2'-O-methyl modified nucleotide
  modified_base 13: mod_base = OTHER; note = 2'-O-methyl modified nucleotide
  modified_base 19: mod_base = OTHER; note = 2'-O-methyl modified nucleotide
  modified_base 20: mod_base = OTHER; note = 2'-O-methyl modified nucleotide
  modified_base 21: mod_base = OTHER; note = nucleotide attached to ggcaucguu via a L1 linker
gatgtgccgcaacgctctgcc

SEQ ID NO: 3134 - RNA, 21 nt, synthetic construct
  source 1..21: mol_type = other RNA
  modified_base 1: mod_base = OTHER; note = 2'-O-methyl modified nucleotide attached to position 22 of SEQ ID NO: 3039 via a L1 linker
  modified_base 2: mod_base = OTHER; note = 2'-O-methyl modified nucleotide
  modified_base 3: mod_base = OTHER; note = 2'-O-methyl modified nucleotide
  modified_base 8: mod_base = OTHER; note = 2'-O-methyl modified nucleotide
  modified_base 10: mod_base = OTHER; note = 2'-O-methyl modified nucleotide
  modified_base 13: mod_base = OTHER; note = 2'-O-methyl modified nucleotide
  modified_base 19: mod_base = OTHER; note = 2'-O-methyl modified nucleotide
  modified_base 20: mod_base = OTHER; note = 2'-O-methyl modified nucleotide
  modified_base 21: mod_base = OTHER; note = nucleotide attached to ggcaucguu via a L1 linker
gatgtgccgcaacgctctgcc

SEQ ID NO: 3135 - RNA, 21 nt, synthetic construct
  source 1..21: mol_type = other RNA
  modified_base 1: mod_base = OTHER; note = 2'-O-methyl modified nucleotide attached to position 22 of SEQ ID NO: 3040 via a L1 linker
  modified_base 2: mod_base = OTHER; note = 2'-O-methyl modified nucleotide
  modified_base 3: mod_base = OTHER; note = 2'-O-methyl modified nucleotide
  modified_base 8: mod_base = OTHER; note = 2'-O-methyl modified nucleotide
  modified_base 10: mod_base = OTHER; note = 2'-O-methyl modified nucleotide
  modified_base 13: mod_base = OTHER; note = 2'-O-methyl modified nucleotide
  modified_base 19: mod_base = OTHER; note = 2'-O-methyl modified nucleotide
  modified_base 20: mod_base = OTHER; note = 2'-O-methyl modified nucleotide
  modified_base 21: mod_base = OTHER; note = nucleotide attached to ggcaucguu via a L1 linker
gatgtgccgcaacgctctgcc

SEQ ID NO: 3136 - RNA, 21 nt, synthetic construct
  source 1..21: mol_type = other RNA
  modified_base 1: mod_base = OTHER; note = 2'-O-methyl modified nucleotide attached to position 22 of SEQ ID NO: 3041 via a L1 linker
  modified_base 2: mod_base = OTHER; note = 2'-O-methyl modified nucleotide
  modified_base 3: mod_base = OTHER; note = 2'-O-methyl modified nucleotide
  modified_base 8: mod_base = OTHER; note = 2'-O-methyl modified nucleotide
  modified_base 10: mod_base = OTHER; note = 2'-O-methyl modified nucleotide
  modified_base 13: mod_base = OTHER; note = 2'-O-methyl modified nucleotide
  modified_base 19: mod_base = OTHER; note = 2'-O-methyl modified nucleotide
  modified_base 20: mod_base = OTHER; note = 2'-O-methyl modified nucleotide
  modified_base 21: mod_base = OTHER; note = nucleotide attached to ggcaucguu via a L1 linker
gatgtgccgcaacgctctgcc

SEQ ID NO: 3137 - RNA, 21 nt, synthetic construct
  source 1..21: mol_type = other RNA
  modified_base 1: mod_base = OTHER; note = 2'-O-methyl modified nucleotide attached to position 22 of SEQ ID NO: 3042 via a L1 linker
  modified_base 2: mod_base = OTHER; note = 2'-O-methyl modified nucleotide
  modified_base 3: mod_base = OTHER; note = 2'-O-methyl modified nucleotide
  modified_base 8: mod_base = OTHER; note = 2'-O-methyl modified nucleotide
  modified_base 10: mod_base = OTHER; note = 2'-O-methyl modified nucleotide
  modified_base 13: mod_base = OTHER; note = 2'-O-methyl modified nucleotide
  modified_base 19: mod_base = OTHER; note = 2'-O-methyl modified nucleotide
  modified_base 20: mod_base = OTHER; note = 2'-O-methyl modified nucleotide
  modified_base 21: mod_base = OTHER; note = nucleotide attached to ggcaucguu via a L1 linker
gatgtgccgcaacgctctgcc

SEQ ID NO: 3138 - RNA, 21 nt, synthetic construct
  source 1..21: mol_type = other RNA
  modified_base 1: mod_base = OTHER; note = 2'-O-methyl modified nucleotide attached to position 22 of SEQ ID NO: 3043 via a L1 linker
  modified_base 2: mod_base = OTHER; note = 2'-O-methyl modified nucleotide
  modified_base 3: mod_base = OTHER; note = 2'-O-methyl modified nucleotide
  modified_base 8: mod_base = OTHER; note = 2'-O-methyl modified nucleotide
  modified_base 10: mod_base = OTHER; note = 2'-O-methyl modified nucleotide
  modified_base 13: mod_base = OTHER; note = 2'-O-methyl modified nucleotide
  modified_base 19: mod_base = OTHER; note = 2'-O-methyl modified nucleotide
  modified_base 20: mod_base = OTHER; note = 2'-O-methyl modified nucleotide
  modified_base 21: mod_base = OTHER; note = nucleotide attached to ggcaucguu via a L1 linker
gatgtgccgcaacgctctgcc

SEQ ID NO: 3139 - RNA, 21 nt, synthetic construct
  source 1..21: mol_type = other RNA
  modified_base 1: mod_base = OTHER; note = 2'-O-methyl modified nucleotide attached to position 22 of SEQ ID NO: 3044 via a L1 linker
  modified_base 2: mod_base = OTHER; note = 2'-O-methyl modified nucleotide
  modified_base 3: mod_base = OTHER; note = 2'-O-methyl modified nucleotide
  modified_base 8: mod_base = OTHER; note = 2'-O-methyl modified nucleotide
  modified_base 10: mod_base = OTHER; note = 2'-O-methyl modified nucleotide
  modified_base 13: mod_base = OTHER; note = 2'-O-methyl modified nucleotide
  modified_base 19: mod_base = OTHER; note = 2'-O-methyl modified nucleotide
  modified_base 20: mod_base = OTHER; note = 2'-O-methyl modified nucleotide
  modified_base 21: mod_base = OTHER; note = nucleotide attached to ggcaucguu via a L1 linker
gatgtgccgcaacgctctgcc

SEQ ID NO: 3140 - RNA, 21 nt, synthetic construct
  source 1..21: mol_type = other RNA
  modified_base 1: mod_base = OTHER; note = 2'-O-methyl modified nucleotide attached to position 22 of SEQ ID NO: 3045 via a L1 linker
  modified_base 2: mod_base = OTHER; note = 2'-O-methyl modified nucleotide
  modified_base 3: mod_base = OTHER; note = 2'-O-methyl modified nucleotide
  modified_base 8: mod_base = OTHER; note = 2'-O-methyl modified nucleotide
  modified_base 10: mod_base = OTHER; note = 2'-O-methyl modified nucleotide
  modified_base 13: mod_base = OTHER; note = 2'-O-methyl modified nucleotide
  modified_base 19: mod_base = OTHER; note = 2'-O-methyl modified nucleotide
  modified_base 20: mod_base = OTHER; note = 2'-O-methyl modified nucleotide
  modified_base 21: mod_base = OTHER; note = nucleotide attached to ggcaucguu via a L1 linker
gatgtgccgcaacgctctgcc

SEQ ID NO: 3141 - RNA, 21 nt, synthetic construct
  source 1..21: mol_type = other RNA
  modified_base 1: mod_base = OTHER; note = 2'-O-methyl modified nucleotide attached to position 22 of SEQ ID NO: 3046 via a L1 linker
  modified_base 2: mod_base = OTHER; note = 2'-O-methyl modified nucleotide
  modified_base 3: mod_base = OTHER; note = 2'-O-methyl modified nucleotide
  modified_base 8: mod_base = OTHER; note = 2'-O-methyl modified nucleotide
  modified_base 10: mod_base = OTHER; note = 2'-O-methyl modified nucleotide
  modified_base 13: mod_base = OTHER; note = 2'-O-methyl modified nucleotide
  modified_base 19: mod_base = OTHER; note = 2'-O-methyl modified nucleotide
  modified_base 20: mod_base = OTHER; note = 2'-O-methyl modified nucleotide
  modified_base 21: mod_base = OTHER; note = nucleotide attached to ggcaucguu via a L1 linker
gatgtgccgcaacgctctgcc

SEQ ID NO: 3142 - RNA, 21 nt, synthetic construct
  source 1..21: mol_type = other RNA
  modified_base 1: mod_base = OTHER; note = 2'-O-methyl modified nucleotide attached to position 22 of SEQ ID NO: 3047 via a L1 linker
  modified_base 2: mod_base = OTHER; note = 2'-O-methyl modified nucleotide
  modified_base 3: mod_base = OTHER; note = 2'-O-methyl modified nucleotide
  modified_base 8: mod_base = OTHER; note = 2'-O-methyl modified nucleotide
  modified_base 10: mod_base = OTHER; note = 2'-O-methyl modified nucleotide
  modified_base 13: mod_base = OTHER; note = 2'-O-methyl modified nucleotide
  modified_base 19: mod_base = OTHER; note = 2'-O-methyl modified nucleotide
  modified_base 20: mod_base = OTHER; note = 2'-O-methyl modified nucleotide
  modified_base 21: mod_base = OTHER; note = nucleotide attached to ggcaucguu via a L1 linker
gatgtgccgcaacgctctgcc

SEQ ID NO: 3143 - RNA, 21 nt, synthetic construct
  source 1..21: mol_type = other RNA
  modified_base 1: mod_base = OTHER; note = 2'-O-methyl modified nucleotide attached to position 22 of SEQ ID NO: 3048 via a L1 linker
  modified_base 2: mod_base = OTHER; note = 2'-O-methyl modified nucleotide
  modified_base 3: mod_base = OTHER; note = 2'-O-methyl modified nucleotide
  modified_base 8: mod_base = OTHER; note = 2'-O-methyl modified nucleotide
  modified_base 10: mod_base = OTHER; note = 2'-O-methyl modified nucleotide
  modified_base 13: mod_base = OTHER; note = 2'-O-methyl modified nucleotide
  modified_base 19: mod_base = OTHER; note = 2'-O-methyl modified nucleotide
  modified_base 20: mod_base = OTHER; note = 2'-O-methyl modified nucleotide
  modified_base 21: mod_base = OTHER; note = nucleotide attached to ggcaucguu via a L1 linker
gatgtgccgcaacgctctgcc

SEQ ID NO: 3144 - RNA, 21 nt, synthetic construct
  source 1..21: mol_type = other RNA
  modified_base 1: mod_base = OTHER; note = 2'-O-methyl modified nucleotide attached to position 22 of SEQ ID NO: 3049 via a L1 linker
  modified_base 2: mod_base = OTHER; note = 2'-O-methyl modified nucleotide
  modified_base 3: mod_base = OTHER; note = 2'-O-methyl modified nucleotide
  modified_base 8: mod_base = OTHER; note = 2'-O-methyl modified nucleotide
  modified_base 10: mod_base = OTHER; note = 2'-O-methyl modified nucleotide
  modified_base 13: mod_base = OTHER; note = 2'-O-methyl modified nucleotide
  modified_base 19: mod_base = OTHER; note = 2'-O-methyl modified nucleotide
  modified_base 20: mod_base = OTHER; note = 2'-O-methyl modified nucleotide
  modified_base 21: mod_base = OTHER; note = nucleotide attached to ggcaucguu via a L1 linker
gatgtgccgcaacgctctgcc

SEQ ID NO: 3145 - RNA, 21 nt, synthetic construct
  source 1..21: mol_type = other RNA
  modified_base 1: mod_base = OTHER; note = 2'-O-methyl modified nucleotide attached to position 22 of SEQ ID NO: 3050 via a L1 linker
  modified_base 2: mod_base = OTHER; note = 2'-O-methyl modified nucleotide
  modified_base 3: mod_base = OTHER; note = 2'-O-methyl modified nucleotide
  modified_base 8: mod_base = OTHER; note = 2'-O-methyl modified nucleotide
  modified_base 10: mod_base = OTHER; note = 2'-O-methyl modified nucleotide
  modified_base 13: mod_base = OTHER; note = 2'-O-methyl modified nucleotide
  modified_base 19: mod_base = OTHER; note = 2'-O-methyl modified nucleotide
  modified_base 20: mod_base = OTHER; note = 2'-O-methyl modified nucleotide
  modified_base 21: mod_base = OTHER; note = nucleotide attached to ggcaucguu via a L1 linker
gatgtgccgcaacgctctgcc

SEQ ID NO: 3146 - RNA, 21 nt, synthetic construct
  source 1..21: mol_type = other RNA
  modified_base 1: mod_base = OTHER; note = 2'-O-methyl modified nucleotide attached to position 22 of SEQ ID NO: 3051 via a L1 linker
  modified_base 2: mod_base = OTHER; note = 2'-O-methyl modified nucleotide
  modified_base 3: mod_base = OTHER; note = 2'-O-methyl modified nucleotide
  modified_base 8: mod_base = OTHER; note = 2'-O-methyl modified nucleotide
  modified_base 10: mod_base = OTHER; note = 2'-O-methyl modified nucleotide
  modified_base 13: mod_base = OTHER; note = 2'-O-methyl modified nucleotide
  modified_base 19: mod_base = OTHER; note = 2'-O-methyl modified nucleotide
  modified_base 20: mod_base = OTHER; note = 2'-O-methyl modified nucleotide
  modified_base 21: mod_base = OTHER; note = nucleotide attached to ggcaucguu via a L1 linker
gatgtgccgcaacgctctgcc

SEQ ID NO: 3147 - RNA, 21 nt, synthetic construct
  source 1..21: mol_type = other RNA
  modified_base 1: mod_base = OTHER; note = 2'-O-methyl modified nucleotide attached to position 22 of SEQ ID NO: 3052 via a L1 linker
  modified_base 2: mod_base = OTHER; note = 2'-O-methyl modified nucleotide
  modified_base 3: mod_base = OTHER; note = 2'-O-methyl modified nucleotide
  modified_base 8: mod_base = OTHER; note = 2'-O-methyl modified nucleotide
  modified_base 10: mod_base = OTHER; note = 2'-O-methyl modified nucleotide
  modified_base 13: mod_base = OTHER; note = 2'-O-methyl modified nucleotide
  modified_base 19: mod_base = OTHER; note = 2'-O-methyl modified nucleotide
  modified_base 20: mod_base = OTHER; note = 2'-O-methyl modified nucleotide
  modified_base 21: mod_base = OTHER; note = nucleotide attached to ggcaucguu via a L1 linker
gatgtgccgcaacgctctgcc

SEQ ID NO: 3148 - RNA, 21 nt, synthetic construct
  source 1..21: mol_type = other RNA
  modified_base 1: mod_base = OTHER; note = 2'-O-methyl modified nucleotide attached to position 22 of SEQ ID NO: 3053 via a L1 linker
  modified_base 2: mod_base = OTHER; note = 2'-O-methyl modified nucleotide
  modified_base 3: mod_base = OTHER; note = 2'-O-methyl modified nucleotide
  modified_base 8: mod_base = OTHER; note = 2'-O-methyl modified nucleotide
  modified_base 10: mod_base = OTHER; note = 2'-O-methyl modified nucleotide
  modified_base 13: mod_base = OTHER; note = 2'-O-methyl modified nucleotide
  modified_base 19: mod_base = OTHER; note = 2'-O-methyl modified nucleotide
  modified_base 20: mod_base = OTHER; note = 2'-O-methyl modified nucleotide
  modified_base 21: mod_base = OTHER; note = nucleotide attached to ggcaucguu via a L1 linker
gatgtgccgcaacgctctgcc

SEQ ID NO: 3149 - RNA, 21 nt, synthetic construct
  source 1..21: mol_type = other RNA
  modified_base 1: mod_base = OTHER; note = 2'-O-methyl modified nucleotide attached to position 22 of SEQ ID NO: 3054 via a L1 linker
  modified_base 2: mod_base = OTHER; note = 2'-O-methyl modified nucleotide
  modified_base 3: mod_base = OTHER; note = 2'-O-methyl modified nucleotide
  modified_base 8: mod_base = OTHER; note = 2'-O-methyl modified nucleotide
  modified_base 10: mod_base = OTHER; note = 2'-O-methyl modified nucleotide
  modified_base 13: mod_base = OTHER; note = 2'-O-methyl modified nucleotide
  modified_base 19: mod_base = OTHER; note = 2'-O-methyl modified nucleotide
  modified_base 20: mod_base = OTHER; note = 2'-O-methyl modified nucleotide
  modified_base 21: mod_base = OTHER; note = nucleotide attached to ggcaucguu via a L1 linker
gatgtgccgcaacgctctgcc

SEQ ID NO: 3150 - RNA, 21 nt, synthetic construct
  source 1..21: mol_type = other RNA
  modified_base 1: mod_base = OTHER; note = 2'-O-methyl modified nucleotide attached to position 22 of SEQ ID NO: 3055 via a L1 linker
  modified_base 2: mod_base = OTHER; note = 2'-O-methyl modified nucleotide
  modified_base 3: mod_base = OTHER; note = 2'-O-methyl modified nucleotide
  modified_base 8: mod_base = OTHER; note = 2'-O-methyl modified nucleotide
  modified_base 10: mod_base = OTHER; note = 2'-O-methyl modified nucleotide
  modified_base 13: mod_base = OTHER; note = 2'-O-methyl modified nucleotide
  modified_base 19: mod_base = OTHER; note = 2'-O-methyl modified nucleotide
  modified_base 20: mod_base = OTHER; note = 2'-O-methyl modified nucleotide
  modified_base 21: mod_base = OTHER; note = nucleotide attached to ggcaucguu via a L1 linker
gatgtgccgcaacgctctgcc

SEQ ID NO: 3151 - RNA, 21 nt, synthetic construct
  source 1..21: mol_type = other RNA
  modified_base 1: mod_base = OTHER; note = 2'-O-methyl modified nucleotide attached to position 22 of SEQ ID NO: 3056 via a L1 linker
  modified_base 2: mod_base = OTHER; note = 2'-O-methyl modified nucleotide
  modified_base 3: mod_base = OTHER; note = 2'-O-methyl modified nucleotide
  modified_base 8: mod_base = OTHER; note = 2'-O-methyl modified nucleotide
  modified_base 10: mod_base = OTHER; note = 2'-O-methyl modified nucleotide
  modified_base 13: mod_base = OTHER; note = 2'-O-methyl modified nucleotide
  modified_base 19: mod_base = OTHER; note = 2'-O-methyl modified nucleotide
  modified_base 20: mod_base = OTHER; note = 2'-O-methyl modified nucleotide
  modified_base 21: mod_base = OTHER; note = nucleotide attached to ggcaucguu via a L1 linker
gatgtgccgcaacgctctgcc

SEQ ID NO: 3152 - RNA, 21 nt, synthetic construct
  source 1..21: mol_type = other RNA
  modified_base 1: mod_base = OTHER; note = 2'-O-methyl modified nucleotide attached to position 22 of SEQ ID NO: 3057 via a L1 linker
  modified_base 2: mod_base = OTHER; note = 2'-O-methyl modified nucleotide
  modified_base 3: mod_base = OTHER; note = 2'-O-methyl modified nucleotide
  modified_base 8: mod_base = OTHER; note = 2'-O-methyl modified nucleotide
  modified_base 10: mod_base = OTHER; note = 2'-O-methyl modified nucleotide
  modified_base 13: mod_base = OTHER; note = 2'-O-methyl modified nucleotide
  modified_base 19: mod_base = OTHER; note = 2'-O-methyl modified nucleotide
  modified_base 20: mod_base = OTHER; note = 2'-O-methyl modified nucleotide
  modified_base 21: mod_base = OTHER; note = nucleotide attached to ggcaucguu via a L1 linker
gatgtgccgcaacgctctgcc

SEQ ID NO: 3153 - RNA, 21 nt, synthetic construct
  source 1..21: mol_type = other RNA
  modified_base 1: mod_base = OTHER; note = 2'-O-methyl modified nucleotide attached to position 22 of SEQ ID NO: 3058 via a L1 linker
  modified_base 2: mod_base = OTHER; note = 2'-O-methyl modified nucleotide
  modified_base 3: mod_base = OTHER; note = 2'-O-methyl modified nucleotide
  modified_base 8: mod_base = OTHER; note = 2'-O-methyl modified nucleotide
  modified_base 10: mod_base = OTHER; note = 2'-O-methyl modified nucleotide
  modified_base 13: mod_base = OTHER; note = 2'-O-methyl modified nucleotide
  modified_base 19: mod_base = OTHER; note = 2'-O-methyl modified nucleotide
  modified_base 20: mod_base = OTHER; note = 2'-O-methyl modified nucleotide
  modified_base 21: mod_base = OTHER; note = nucleotide attached to ggcaucguu via a L1 linker
gatgtgccgcaacgctctgcc

SEQ ID NO: 3154 - RNA, 21 nt, synthetic construct
  source 1..21: mol_type = other RNA
  modified_base 1: mod_base = OTHER; note = 2'-O-methyl modified nucleotide attached to position 22 of SEQ ID NO: 3059 via a L1 linker
  modified_base 2: mod_base = OTHER; note = 2'-O-methyl modified nucleotide
  modified_base 3: mod_base = OTHER; note = 2'-O-methyl modified nucleotide
  modified_base 8: mod_base = OTHER; note = 2'-O-methyl modified nucleotide
  modified_base 10: mod_base = OTHER; note = 2'-O-methyl modified nucleotide
  modified_base 13: mod_base = OTHER; note = 2'-O-methyl modified nucleotide
  modified_base 19: mod_base = OTHER; note = 2'-O-methyl modified nucleotide
  modified_base 20: mod_base = OTHER; note = 2'-O-methyl modified nucleotide
  modified_base 21: mod_base = OTHER; note = nucleotide attached to ggcaucguu via a L1 linker
gatgtgccgcaacgctctgcc

SEQ ID NO: 3155 - RNA, 21 nt, synthetic construct
  source 1..21: mol_type = other RNA
  modified_base 1: mod_base = OTHER; note = 2'-O-methyl modified nucleotide attached to position 22 of SEQ ID NO: 3060 via a L1 linker
  modified_base 2: mod_base = OTHER; note = 2'-O-methyl modified nucleotide
  modified_base 3: mod_base = OTHER; note = 2'-O-methyl modified nucleotide
  modified_base 8: mod_base = OTHER; note = 2'-O-methyl modified nucleotide
  modified_base 10: mod_base = OTHER; note = 2'-O-methyl modified nucleotide
  modified_base 13: mod_base = OTHER; note = 2'-O-methyl modified nucleotide
  modified_base 19: mod_base = OTHER; note = 2'-O-methyl modified nucleotide
  modified_base 20: mod_base = OTHER; note = 2'-O-methyl modified nucleotide
  modified_base 21: mod_base = OTHER; note = nucleotide attached to ggcaucguu via a L1 linker
gatgtgccgcaacgctctgcc

SEQ ID NO: 3156 - RNA, 21 nt, synthetic construct
  source 1..21: mol_type = other RNA
  modified_base 1: mod_base = OTHER; note = 2'-O-methyl modified nucleotide attached to position 22 of SEQ ID NO: 3061 via a L1 linker
  modified_base 2: mod_base = OTHER; note = 2'-O-methyl modified nucleotide
  modified_base 3: mod_base = OTHER; note = 2'-O-methyl modified nucleotide
  modified_base 8: mod_base = OTHER; note = 2'-O-methyl modified nucleotide
  modified_base 10: mod_base = OTHER; note = 2'-O-methyl modified nucleotide
  modified_base 13: mod_base = OTHER; note = 2'-O-methyl modified nucleotide
  modified_base 19: mod_base = OTHER; note = 2'-O-methyl modified nucleotide
  modified_base 20: mod_base = OTHER; note = 2'-O-methyl modified nucleotide
  modified_base 21: mod_base = OTHER; note = nucleotide attached to ggcaucguu via a L1 linker
gatgtgccgcaacgctctgcc

SEQ ID NO: 3157 - RNA, 21 nt, synthetic construct
  source 1..21: mol_type = other RNA
  modified_base 1: mod_base = OTHER; note = 2'-O-methyl modified nucleotide attached to position 22 of SEQ ID NO: 3062 via a L1 linker
  modified_base 2: mod_base = OTHER; note = 2'-O-methyl modified nucleotide
  modified_base 3: mod_base = OTHER; note = 2'-O-methyl modified nucleotide
  modified_base 8: mod_base = OTHER; note = 2'-O-methyl modified nucleotide
  modified_base 10: mod_base = OTHER; note = 2'-O-methyl modified nucleotide
  modified_base 13: mod_base = OTHER; note = 2'-O-methyl modified nucleotide
  modified_base 19: mod_base = OTHER; note = 2'-O-methyl modified nucleotide
  modified_base 20: mod_base = OTHER; note = 2'-O-methyl modified nucleotide
  modified_base 21: mod_base = OTHER; note = nucleotide attached to ggcaucguu via a L1 linker
gatgtgccgcaacgctctgcc

SEQ ID NO: 3158 - RNA, 21 nt, synthetic construct
  source 1..21: mol_type = other RNA
  modified_base 1: mod_base = OTHER; note = 2'-O-methyl modified nucleotide attached to position 22 of SEQ ID NO: 3063 via a L1 linker
  modified_base 2: mod_base = OTHER; note = 2'-O-methyl modified nucleotide
  modified_base 3: mod_base = OTHER; note = 2'-O-methyl modified nucleotide
  modified_base 8: mod_base = OTHER; note = 2'-O-methyl modified nucleotide
  modified_base 10: mod_base = OTHER; note = 2'-O-methyl modified nucleotide
  modified_base 13: mod_base = OTHER; note = 2'-O-methyl modified nucleotide
  modified_base 19: mod_base = OTHER; note = 2'-O-methyl modified nucleotide
  modified_base 20: mod_base = OTHER; note = 2'-O-methyl modified nucleotide
  modified_base 21: mod_base = OTHER; note = nucleotide attached to ggcaucguu via a L1 linker
gatgtgccgcaacgctctgcc

SEQ ID NO: 3159 - RNA, 21 nt, synthetic construct
  source 1..21: mol_type = other RNA
  modified_base 1: mod_base = OTHER; note = 2'-O-methyl modified nucleotide attached to position 22 of SEQ ID NO: 3064 via a L1 linker
  modified_base 2: mod_base = OTHER; note = 2'-O-methyl modified nucleotide
  modified_base 3: mod_base = OTHER; note = 2'-O-methyl modified nucleotide
  modified_base 8: mod_base = OTHER; note = 2'-O-methyl modified nucleotide
  modified_base 10: mod_base = OTHER; note = 2'-O-methyl modified nucleotide
  modified_base 13: mod_base = OTHER; note = 2'-O-methyl modified nucleotide
  modified_base 19: mod_base = OTHER; note = 2'-O-methyl modified nucleotide
  modified_base 20: mod_base = OTHER; note = 2'-O-methyl modified nucleotide
  modified_base 21: mod_base = OTHER; note = nucleotide attached to ggcaucguu via a L1 linker
gatgtgccgcaacgctctgcc

SEQ ID NO: 3160 - RNA, 21 nt, synthetic construct
  source 1..21: mol_type = other RNA
  modified_base 1: mod_base = OTHER; note = 2'-O-methyl modified nucleotide attached to position 22 of SEQ ID NO: 3065 via a L1 linker
  modified_base 2: mod_base = OTHER; note = 2'-O-methyl modified nucleotide
  modified_base 3: mod_base = OTHER; note = 2'-O-methyl modified nucleotide
  modified_base 8: mod_base = OTHER; note = 2'-O-methyl modified nucleotide
  modified_base 10: mod_base = OTHER; note = 2'-O-methyl modified nucleotide
  modified_base 13: mod_base = OTHER; note = 2'-O-methyl modified nucleotide
  modified_base 19: mod_base = OTHER; note = 2'-O-methyl modified nucleotide
  modified_base 20: mod_base = OTHER; note = 2'-O-methyl modified nucleotide
  modified_base 21: mod_base = OTHER; note = nucleotide attached to ggcaucguu via a L1 linker
gatgtgccgcaacgctctgcc

SEQ ID NO: 3161 - RNA, 21 nt, synthetic construct
  source 1..21: mol_type = other RNA
  modified_base 1: mod_base = OTHER; note = 2'-O-methyl modified nucleotide attached to position 22 of SEQ ID NO: 3066 via a L1 linker
  modified_base 2: mod_base = OTHER; note = 2'-O-methyl modified nucleotide
  modified_base 3: mod_base = OTHER; note = 2'-O-methyl modified nucleotide
  modified_base 8: mod_base = OTHER; note = 2'-O-methyl modified nucleotide
  modified_base 10: mod_base = OTHER; note = 2'-O-methyl modified nucleotide
  modified_base 13: mod_base = OTHER; note = 2'-O-methyl modified nucleotide
  modified_base 19: mod_base = OTHER; note = 2'-O-methyl modified nucleotide
  modified_base 20: mod_base = OTHER; note = 2'-O-methyl modified nucleotide
  modified_base 21: mod_base = OTHER; note = nucleotide attached to ggcaucguu via a L1 linker
gatgtgccgcaacgctctgcc

SEQ ID NO: 3162 - RNA, 21 nt, synthetic construct
  source 1..21: mol_type = other RNA
  modified_base 1: mod_base = OTHER; note = 2'-O-methyl modified nucleotide attached to position 22 of SEQ ID NO: 3067 via a L1 linker
  modified_base 2: mod_base = OTHER; note = 2'-O-methyl modified nucleotide
  modified_base 3: mod_base = OTHER; note = 2'-O-methyl modified nucleotide
  modified_base 8: mod_base = OTHER; note = 2'-O-methyl modified nucleotide
  modified_base 10: mod_base = OTHER; note = 2'-O-methyl modified nucleotide
  modified_base 13: mod_base = OTHER; note = 2'-O-methyl modified nucleotide
  modified_base 19: mod_base = OTHER; note = 2'-O-methyl modified nucleotide
  modified_base 20: mod_base = OTHER; note = 2'-O-methyl modified nucleotide
  modified_base 21: mod_base = OTHER; note = nucleotide attached to ggcaucguu via a L1 linker
gatgtgccgcaacgctctgcc

SEQ ID NO: 3163 - RNA, 21 nt, synthetic construct
  source 1..21: mol_type = other RNA
  modified_base 1: mod_base = OTHER; note = 2'-O-methyl modified nucleotide attached to position 22 of SEQ ID NO: 3068 via a L1 linker
  modified_base 2: mod_base = OTHER; note = 2'-O-methyl modified nucleotide
  modified_base 3: mod_base = OTHER; note = 2'-O-methyl modified nucleotide
  modified_base 8: mod_base = OTHER; note = 2'-O-methyl modified nucleotide
  modified_base 10: mod_base = OTHER; note = 2'-O-methyl modified nucleotide
  modified_base 13: mod_base = OTHER; note = 2'-O-methyl modified nucleotide
  modified_base 19: mod_base = OTHER; note = 2'-O-methyl modified nucleotide
  modified_base 20: mod_base = OTHER; note = 2'-O-methyl modified nucleotide
  modified_base 21: mod_base = OTHER; note = nucleotide attached to ggcaucguu via a L1 linker
gatgtgccgcaacgctctgcc

SEQ ID NO: 3164 - RNA, 21 nt, synthetic construct
  source 1..21: mol_type = other RNA
  modified_base 1: mod_base = OTHER; note = 2'-O-methyl modified nucleotide attached to position 22 of SEQ ID NO: 3069 via a L1 linker
  modified_base 2: mod_base = OTHER; note = 2'-O-methyl modified nucleotide
  modified_base 3: mod_base = OTHER; note = 2'-O-methyl modified nucleotide
  modified_base 8: mod_base = OTHER; note = 2'-O-methyl modified nucleotide
  modified_base 10: mod_base = OTHER; note = 2'-O-methyl modified nucleotide
  modified_base 13: mod_base = OTHER; note = 2'-O-methyl modified nucleotide
  modified_base 19: mod_base = OTHER; note = 2'-O-methyl modified nucleotide
  modified_base 20: mod_base = OTHER; note = 2'-O-methyl modified nucleotide
  modified_base 21: mod_base = OTHER; note = nucleotide attached to ggcaucguu via a L1 linker
gatgtgccgcaacgctctgcc

SEQ ID NO: 3165 - RNA, 21 nt, synthetic construct
  source 1..21: mol_type = other RNA
  modified_base 1: mod_base = OTHER; note = 2'-O-methyl modified nucleotide attached to position 22 of SEQ ID NO: 3070 via a L1 linker
  modified_base 2: mod_base = OTHER; note = 2'-O-methyl modified nucleotide
  modified_base 3: mod_base = OTHER; note = 2'-O-methyl modified nucleotide
  modified_base 8: mod_base = OTHER; note = 2'-O-methyl modified nucleotide
  modified_base 10: mod_base = OTHER; note = 2'-O-methyl modified nucleotide
  modified_base 13: mod_base = OTHER; note = 2'-O-methyl modified nucleotide
  modified_base 19: mod_base = OTHER; note = 2'-O-methyl modified nucleotide
  modified_base 20: mod_base = OTHER; note = 2'-O-methyl modified nucleotide
  modified_base 21: mod_base = OTHER; note = nucleotide attached to ggcaucguu via a L1 linker
gatgtgccgcaacgctctgcc

SEQ ID NO: 3166 - RNA, 21 nt, synthetic construct
  source 1..21: mol_type = other RNA
  modified_base 1: mod_base = OTHER; note = 2'-O-methyl modified nucleotide attached to position 22 of SEQ ID NO: 3071 via a L1 linker
  modified_base 2: mod_base = OTHER; note = 2'-O-methyl modified nucleotide
  modified_base 3: mod_base = OTHER; note = 2'-O-methyl modified nucleotide
  modified_base 8: mod_base = OTHER; note = 2'-O-methyl modified nucleotide
  modified_base 10: mod_base = OTHER; note = 2'-O-methyl modified nucleotide
  modified_base 13: mod_base = OTHER; note = 2'-O-methyl modified nucleotide
  modified_base 19: mod_base = OTHER; note = 2'-O-methyl modified nucleotide
  modified_base 20: mod_base = OTHER; note = 2'-O-methyl modified nucleotide
  modified_base 21: mod_base = OTHER; note = nucleotide attached to ggcaucguu via a L1 linker
gatgtgccgcaacgctctgcc

SEQ ID NO: 3167 - RNA, 21 nt, synthetic construct
  source 1..21: mol_type = other RNA
  modified_base 1: mod_base = OTHER; note = 2'-O-methyl modified nucleotide attached to position 22 of SEQ ID NO: 3072 via a L1 linker
  modified_base 2: mod_base = OTHER; note = 2'-O-methyl modified nucleotide
  modified_base 3: mod_base = OTHER; note = 2'-O-methyl modified nucleotide
  modified_base 8: mod_base = OTHER; note = 2'-O-methyl modified nucleotide
  modified_base 10: mod_base = OTHER; note = 2'-O-methyl modified nucleotide
  modified_base 13: mod_base = OTHER; note = 2'-O-methyl modified nucleotide
  modified_base 19: mod_base = OTHER; note = 2'-O-methyl modified nucleotide
  modified_base 20: mod_base = OTHER; note = 2'-O-methyl modified nucleotide
  modified_base 21: mod_base = OTHER; note = nucleotide attached to ggcaucguu via a L1 linker
gatgtgccgcaacgctctgcc

SEQ ID NO: 3168 - RNA, 21 nt, synthetic construct
  source 1..21: mol_type = other RNA
  modified_base 1: mod_base = OTHER; note = 2'-O-methyl modified nucleotide attached to position 22 of SEQ ID NO: 3073 via a L1 linker
  modified_base 2: mod_base = OTHER; note = 2'-O-methyl modified nucleotide
  modified_base 3: mod_base = OTHER; note = 2'-O-methyl modified nucleotide
  modified_base 8: mod_base = OTHER; note = 2'-O-methyl modified nucleotide
  modified_base 10: mod_base = OTHER; note = 2'-O-methyl modified nucleotide
  modified_base 13: mod_base = OTHER; note = 2'-O-methyl modified nucleotide
  modified_base 19: mod_base = OTHER; note = 2'-O-methyl modified nucleotide
  modified_base 20: mod_base = OTHER; note = 2'-O-methyl modified nucleotide
  modified_base 21: mod_base = OTHER; note = nucleotide attached to ggcaucguu via a L1 linker
gatgtgccgcaacgctctgcc

SEQ ID NO: 3169 - RNA, 21 nt, synthetic construct
  source 1..21: mol_type = other RNA
  modified_base 1: mod_base = OTHER; note = 2'-O-methyl modified nucleotide attached to position 22 of SEQ ID NO: 3074 via a L1 linker
  modified_base 2: mod_base = OTHER; note = 2'-O-methyl modified nucleotide
  modified_base 3: mod_base = OTHER; note = 2'-O-methyl modified nucleotide
  modified_base 8: mod_base = OTHER; note = 2'-O-methyl modified nucleotide
  modified_base 10: mod_base = OTHER; note = 2'-O-methyl modified nucleotide
  modified_base 13: mod_base = OTHER; note = 2'-O-methyl modified nucleotide
  modified_base 19: mod_base = OTHER; note = 2'-O-methyl modified nucleotide
  modified_base 20: mod_base = OTHER; note = 2'-O-methyl modified nucleotide
  modified_base 21: mod_base = OTHER; note = nucleotide attached to ggcaucguu via a L1 linker
gatgtgccgcaacgctctgcc

SEQ ID NO: 3170 - RNA, 21 nt, synthetic construct
  source 1..21: mol_type = other RNA
  modified_base 1: mod_base = OTHER; note = 2'-O-methyl modified nucleotide attached to position 22 of SEQ ID NO: 3075 via a L1 linker
  modified_base 2: mod_base = OTHER; note = 2'-O-methyl modified nucleotide
  modified_base 3: mod_base = OTHER; note = 2'-O-methyl modified nucleotide
  modified_base 8: mod_base = OTHER; note = 2'-O-methyl modified nucleotide
  modified_base 10: mod_base = OTHER; note = 2'-O-methyl modified nucleotide
  modified_base 13: mod_base = OTHER; note = 2'-O-methyl modified nucleotide
  modified_base 19: mod_base = OTHER; note = 2'-O-methyl modified nucleotide
  modified_base 20: mod_base = OTHER; note = 2'-O-methyl modified nucleotide
  modified_base 21: mod_base = OTHER; note = nucleotide attached to ggcaucguu via a L1 linker
gatgtgccgcaacgctctgcc

SEQ ID NO: 3171 - RNA, 21 nt, synthetic construct
  source 1..21: mol_type = other RNA
  modified_base 1: mod_base = OTHER; note = 2'-O-methyl modified nucleotide attached to position 22 of SEQ ID NO: 3076 via a L1 linker
  modified_base 2: mod_base = OTHER; note = 2'-O-methyl modified nucleotide
  modified_base 3: mod_base = OTHER; note = 2'-O-methyl modified nucleotide
  modified_base 8: mod_base = OTHER; note = 2'-O-methyl modified nucleotide
  modified_base 10: mod_base = OTHER; note = 2'-O-methyl modified nucleotide
  modified_base 13: mod_base = OTHER; note = 2'-O-methyl modified nucleotide
  modified_base 19: mod_base = OTHER; note = 2'-O-methyl modified nucleotide
  modified_base 20: mod_base = OTHER; note = 2'-O-methyl modified nucleotide
  modified_base 21: mod_base = OTHER; note = nucleotide attached to ggcaucguu via a L1 linker
gatgtgccgcaacgctctgcc

SEQ ID NO: 3172 - RNA, 21 nt, synthetic construct
  source 1..21: mol_type = other RNA
  modified_base 1: mod_base = OTHER; note = 2'-O-methyl modified nucleotide attached to position 22 of SEQ ID NO: 3077 via a L1 linker
  modified_base 2: mod_base = OTHER; note = 2'-O-methyl modified nucleotide
  modified_base 3: mod_base = OTHER; note = 2'-O-methyl modified nucleotide
  modified_base 8: mod_base = OTHER; note = 2'-O-methyl modified nucleotide
  modified_base 10: mod_base = OTHER; note = 2'-O-methyl modified nucleotide
  modified_base 13: mod_base = OTHER; note = 2'-O-methyl modified nucleotide
  modified_base 19: mod_base = OTHER; note = 2'-O-methyl modified nucleotide
  modified_base 20: mod_base = OTHER; note = 2'-O-methyl modified nucleotide
  modified_base 21: mod_base = OTHER; note = nucleotide attached to ggcaucguu via a L1 linker
gatgtgccgcaacgctctgcc

SEQ ID NO: 3173 - RNA, 21 nt, synthetic construct
  source 1..21: mol_type = other RNA
  modified_base 1: mod_base = OTHER; note = 2'-O-methyl modified nucleotide attached to position 22 of SEQ ID NO: 3078 via a L1 linker
  modified_base 2: mod_base = OTHER; note = 2'-O-methyl modified nucleotide
  modified_base 3: mod_base = OTHER; note = 2'-O-methyl modified nucleotide
  modified_base 8: mod_base = OTHER; note = 2'-O-methyl modified nucleotide
  modified_base 10: mod_base = OTHER; note = 2'-O-methyl modified nucleotide
  modified_base 13: mod_base = OTHER; note = 2'-O-methyl modified nucleotide
  modified_base 19: mod_base = OTHER; note = 2'-O-methyl modified nucleotide
  modified_base 20: mod_base = OTHER; note = 2'-O-methyl modified nucleotide
  modified_base 21: mod_base = OTHER; note = nucleotide attached to ggcaucguu via a L1 linker
gatgtgccgcaacgctctgcc

SEQ ID NO: 3174 - RNA, 21 nt, synthetic construct
  source 1..21: mol_type = other RNA
  modified_base 1: mod_base = OTHER; note = 2'-O-methyl modified nucleotide attached to position 22 of SEQ ID NO: 3079 via a L1 linker
  modified_base 2: mod_base = OTHER; note = 2'-O-methyl modified nucleotide
  modified_base 3: mod_base = OTHER; note = 2'-O-methyl modified nucleotide
  modified_base 8: mod_base = OTHER; note = 2'-O-methyl modified nucleotide
  modified_base 10: mod_base = OTHER; note = 2'-O-methyl modified nucleotide
  modified_base 13: mod_base = OTHER; note = 2'-O-methyl modified nucleotide
  modified_base 19: mod_base = OTHER; note = 2'-O-methyl modified nucleotide
  modified_base 20: mod_base = OTHER; note = 2'-O-methyl modified nucleotide
  modified_base 21: mod_base = OTHER; note = nucleotide attached to ggcaucguu via a L1 linker
gatgtgccgcaacgctctgcc

SEQ ID NO: 3175 - RNA, 21 nt, synthetic construct
  source 1..21: mol_type = other RNA
  modified_base 1: mod_base = OTHER; note = 2'-O-methyl modified nucleotide attached to position 22 of SEQ ID NO: 3080 via a L1 linker
  modified_base 2: mod_base = OTHER; note = 2'-O-methyl modified nucleotide
  modified_base 3: mod_base = OTHER; note = 2'-O-methyl modified nucleotide
  modified_base 8: mod_base = OTHER; note = 2'-O-methyl modified nucleotide
  modified_base 10: mod_base = OTHER; note = 2'-O-methyl modified nucleotide
  modified_base 13: mod_base = OTHER; note = 2'-O-methyl modified nucleotide
  modified_base 19: mod_base = OTHER; note = 2'-O-methyl modified nucleotide
  modified_base 20: mod_base = OTHER; note = 2'-O-methyl modified nucleotide
  modified_base 21: mod_base = OTHER; note = nucleotide attached to ggcaucguu via a L1 linker
gatgtgccgcaacgctctgcc

SEQ ID NO: 3176 - RNA, 21 nt, synthetic construct
  source 1..21: mol_type = other RNA
  modified_base 1: mod_base = OTHER; note = 2'-O-methyl modified nucleotide attached to position 22 of SEQ ID NO: 3081 via a L1 linker
  modified_base 2: mod_base = OTHER; note = 2'-O-methyl modified nucleotide
  modified_base 3: mod_base = OTHER; note = 2'-O-methyl modified nucleotide
  modified_base 8: mod_base = OTHER; note = 2'-O-methyl modified nucleotide
  modified_base 10: mod_base = OTHER; note = 2'-O-methyl modified nucleotide
  modified_base 13: mod_base = OTHER; note = 2'-O-methyl modified nucleotide
  modified_base 19: mod_base = OTHER; note = 2'-O-methyl modified nucleotide
  modified_base 20: mod_base = OTHER; note = 2'-O-methyl modified nucleotide
  modified_base 21: mod_base = OTHER; note = nucleotide attached to ggcaucguu via a L1 linker
gatgtgccgcaacgctctgcc

SEQ ID NO: 3177 - RNA, 21 nt, synthetic construct
  source 1..21: mol_type = other RNA
  modified_base 1: mod_base = OTHER; note = 2'-O-methyl modified nucleotide attached to position 22 of SEQ ID NO: 3082 via a L1 linker
  modified_base 2: mod_base = OTHER; note = 2'-O-methyl modified nucleotide
  modified_base 3: mod_base = OTHER; note = 2'-O-methyl modified nucleotide
  modified_base 8: mod_base = OTHER; note = 2'-O-methyl modified nucleotide
  modified_base 10: mod_base = OTHER; note = 2'-O-methyl modified nucleotide
  modified_base 13: mod_base = OTHER; note = 2'-O-methyl modified nucleotide
  modified_base 19: mod_base = OTHER; note = 2'-O-methyl modified nucleotide
  modified_base 20: mod_base = OTHER; note = 2'-O-methyl modified nucleotide
  modified_base 21: mod_base = OTHER; note = nucleotide attached to ggcaucguu via a L1 linker
gatgtgccgcaacgctctgcc

SEQ ID NO: 3178 - RNA, 21 nt, synthetic construct
  source 1..21: mol_type = other RNA
  modified_base 1: mod_base = OTHER; note = 2'-O-methyl modified nucleotide attached to position 22 of SEQ ID NO: 3083 via a L1 linker
  modified_base 2: mod_base = OTHER; note = 2'-O-methyl modified nucleotide
  modified_base 3: mod_base = OTHER; note = 2'-O-methyl modified nucleotide
  modified_base 8: mod_base = OTHER; note = 2'-O-methyl modified nucleotide
  modified_base 10: mod_base = OTHER; note = 2'-O-methyl modified nucleotide
  modified_base 13: mod_base = OTHER; note = 2'-O-methyl modified nucleotide
  modified_base 19: mod_base = OTHER; note = 2'-O-methyl modified nucleotide
  modified_base 20: mod_base = OTHER; note = 2'-O-methyl modified nucleotide
  modified_base 21: mod_base = OTHER; note = nucleotide attached to ggcaucguu via a L1 linker
gatgtgccgcaacgctctgcc

SEQ ID NO: 3179 - RNA, 21 nt, synthetic construct
  source 1..21: mol_type = other RNA
  modified_base 1: mod_base = OTHER; note = 2'-O-methyl modified nucleotide attached to position 22 of SEQ ID NO: 3084 via a L1 linker
  modified_base 2: mod_base = OTHER; note = 2'-O-methyl modified nucleotide
  modified_base 3: mod_base = OTHER; note = 2'-O-methyl modified nucleotide
  modified_base 8: mod_base = OTHER; note = 2'-O-methyl modified nucleotide
  modified_base 10: mod_base = OTHER; note = 2'-O-methyl modified nucleotide
  modified_base 13: mod_base = OTHER; note = 2'-O-methyl modified nucleotide
  modified_base 19: mod_base = OTHER; note = 2'-O-methyl modified nucleotide
  modified_base 20: mod_base = OTHER; note = 2'-O-methyl modified nucleotide
  modified_base 21: mod_base = OTHER; note = nucleotide attached to ggcaucguu via a L1 linker
gatgtgccgcaacgctctgcc

SEQ ID NO: 3180 - RNA, 21 nt, synthetic construct
  source 1..21: mol_type = other RNA
  modified_base 1: mod_base = OTHER; note = 2'-O-methyl modified nucleotide attached to position 22 of SEQ ID NO: 3085 via a L1 linker
  modified_base 2: mod_base = OTHER; note = 2'-O-methyl modified nucleotide
  modified_base 3: mod_base = OTHER; note = 2'-O-methyl modified nucleotide
  modified_base 8: mod_base = OTHER; note = 2'-O-methyl modified nucleotide
  modified_base 10: mod_base = OTHER; note = 2'-O-methyl modified nucleotide
  modified_base 13: mod_base = OTHER; note = 2'-O-methyl modified nucleotide
  modified_base 19: mod_base = OTHER; note = 2'-O-methyl modified nucleotide
  modified_base 20: mod_base = OTHER; note = 2'-O-methyl modified nucleotide
  modified_base 21: mod_base = OTHER; note = nucleotide attached to ggcaucguu via a L1 linker
gatgtgccgcaacgctctgcc

SEQ ID NO: 3181 - RNA, 21 nt, synthetic construct
  source 1..21: mol_type = other RNA
  modified_base 1: mod_base = OTHER; note = 2'-O-methyl modified nucleotide attached to position 22 of SEQ ID NO: 3086 via a L1 linker
  modified_base 2: mod_base = OTHER; note = 2'-O-methyl modified nucleotide
  modified_base 3: mod_base = OTHER; note = 2'-O-methyl modified nucleotide
  modified_base 8: mod_base = OTHER; note = 2'-O-methyl modified nucleotide
  modified_base 10: mod_base = OTHER; note = 2'-O-methyl modified nucleotide
  modified_base 13: mod_base = OTHER; note = 2'-O-methyl modified nucleotide
  modified_base 19: mod_base = OTHER; note = 2'-O-methyl modified nucleotide
  modified_base 20: mod_base = OTHER; note = 2'-O-methyl modified nucleotide
  modified_base 21: mod_base = OTHER; note = nucleotide attached to ggcaucguu via a L1 linker
gatgtgccgcaacgctctgcc

SEQ ID NO: 3182 - RNA, 21 nt, synthetic construct
  source 1..21: mol_type = other RNA
  modified_base 1: mod_base = OTHER; note = 2'-O-methyl modified nucleotide attached to position 22 of SEQ ID NO: 3087 via a L1 linker
  modified_base 2: mod_base = OTHER; note = 2'-O-methyl modified nucleotide
  modified_base 3: mod_base = OTHER; note = 2'-O-methyl modified nucleotide
  modified_base 8: mod_base = OTHER; note = 2'-O-methyl modified nucleotide
  modified_base 10: mod_base = OTHER; note = 2'-O-methyl modified nucleotide
  modified_base 13: mod_base = OTHER; note = 2'-O-methyl modified nucleotide
  modified_base 19: mod_base = OTHER; note = 2'-O-methyl modified nucleotide
  modified_base 20: mod_base = OTHER; note = 2'-O-methyl modified nucleotide
  modified_base 21: mod_base = OTHER; note = nucleotide attached to ggcaucguu via a L1 linker
gatgtgccgcaacgctctgcc

SEQ ID NO: 3183 - RNA, 21 nt, synthetic construct
  source 1..21: mol_type = other RNA
  modified_base 1: mod_base = OTHER; note = 2'-O-methyl modified nucleotide attached to position 22 of SEQ ID NO: 3088 via a L1 linker
  modified_base 2: mod_base = OTHER; note = 2'-O-methyl modified nucleotide
  modified_base 3: mod_base = OTHER; note = 2'-O-methyl modified nucleotide
  modified_base 8: mod_base = OTHER; note = 2'-O-methyl modified nucleotide
  modified_base 10: mod_base = OTHER; note = 2'-O-methyl modified nucleotide
  modified_base 13: mod_base = OTHER; note = 2'-O-methyl modified nucleotide
  modified_base 19: mod_base = OTHER; note = 2'-O-methyl modified nucleotide
  modified_base 20: mod_base = OTHER; note = 2'-O-methyl modified nucleotide
  modified_base 21: mod_base = OTHER; note = nucleotide attached to ggcaucguu via a L1 linker
gatgtgccgcaacgctctgcc

SEQ ID NO: 3184 - RNA, 21 nt, synthetic construct
  source 1..21: mol_type = other RNA
  modified_base 1: mod_base = OTHER; note = 2'-O-methyl modified nucleotide attached to position 22 of SEQ ID NO: 3089 via a L1 linker
  modified_base 2: mod_base = OTHER; note = 2'-O-methyl modified nucleotide
  modified_base 3: mod_base = OTHER; note = 2'-O-methyl modified nucleotide
  modified_base 8: mod_base = OTHER; note = 2'-O-methyl modified nucleotide
  modified_base 10: mod_base = OTHER; note = 2'-O-methyl modified nucleotide
  modified_base 13: mod_base = OTHER; note = 2'-O-methyl modified nucleotide
  modified_base 19: mod_base = OTHER; note = 2'-O-methyl modified nucleotide
  modified_base 20: mod_base = OTHER; note = 2'-O-methyl modified nucleotide
  modified_base 21: mod_base = OTHER; note = nucleotide attached to ggcaucguu via a L1 linker
gatgtgccgcaacgctctgcc

SEQ ID NO: 3185 - RNA, 21 nt, synthetic construct
  source 1..21: mol_type = other RNA
  modified_base 1: mod_base = OTHER; note = 2'-O-methyl modified nucleotide attached to position 22 of SEQ ID NO: 3090 via a L1 linker
  modified_base 2: mod_base = OTHER; note = 2'-O-methyl modified nucleotide
  modified_base 3: mod_base = OTHER; note = 2'-O-methyl modified nucleotide
  modified_base 8: mod_base = OTHER; note = 2'-O-methyl modified nucleotide
  modified_base 10: mod_base = OTHER; note = 2'-O-methyl modified nucleotide
  modified_base 13: mod_base = OTHER; note = 2'-O-methyl modified nucleotide
  modified_base 19: mod_base = OTHER; note = 2'-O-methyl modified nucleotide
  modified_base 20: mod_base = OTHER; note = 2'-O-methyl modified nucleotide
  modified_base 21: mod_base = OTHER; note = nucleotide attached to ggcaucguu via a L1 linker
gatgtgccgcaacgctctgcc

SEQ ID NO: 3186 - RNA, 21 nt, synthetic construct
  source 1..21: mol_type = other RNA
  modified_base 1: mod_base = OTHER; note = 2'-O-methyl modified nucleotide attached to position 22 of SEQ ID NO: 3091 via a L1 linker
  modified_base 2: mod_base = OTHER; note = 2'-O-methyl modified nucleotide
  modified_base 3: mod_base = OTHER; note = 2'-O-methyl modified nucleotide
  modified_base 8: mod_base = OTHER; note = 2'-O-methyl modified nucleotide
  modified_base 10: mod_base = OTHER; note = 2'-O-methyl modified nucleotide
  modified_base 13: mod_base = OTHER; note = 2'-O-methyl modified nucleotide
  modified_base 19: mod_base = OTHER; note = 2'-O-methyl modified nucleotide
  modified_base 20: mod_base = OTHER; note = 2'-O-methyl modified nucleotide
  modified_base 21: mod_base = OTHER; note = nucleotide attached to ggcaucguu via a L1 linker
gatgtgccgcaacgctctgcc

SEQ ID NO: 3187 - RNA, 21 nt, synthetic construct
  source 1..21: mol_type = other RNA
  modified_base 1: mod_base = OTHER; note = 2'-O-methyl modified nucleotide attached to position 22 of SEQ ID NO: 3092 via a L1 linker
  modified_base 2: mod_base = OTHER; note = 2'-O-methyl modified nucleotide
  modified_base 3: mod_base = OTHER; note = 2'-O-methyl modified nucleotide
  modified_base 8: mod_base = OTHER; note = 2'-O-methyl modified nucleotide
  modified_base 10: mod_base = OTHER; note = 2'-O-methyl modified nucleotide
  modified_base 13: mod_base = OTHER; note = 2'-O-methyl modified nucleotide
  modified_base 19: mod_base = OTHER; note = 2'-O-methyl modified nucleotide
  modified_base 20: mod_base = OTHER; note = 2'-O-methyl modified nucleotide
  modified_base 21: mod_base = OTHER; note = nucleotide attached to ggcaucguu via a L1 linker
gatgtgccgcaacgctctgcc

SEQ ID NO: 3188 - RNA, 21 nt, synthetic construct
  source 1..21: mol_type = other RNA
  modified_base 1: mod_base = OTHER; note = 2'-O-methyl modified nucleotide attached to position 22 of SEQ ID NO: 3093 via a L1 linker
  modified_base 2: mod_base = OTHER; note = 2'-O-methyl modified nucleotide
  modified_base 3: mod_base = OTHER; note = 2'-O-methyl modified nucleotide
  modified_base 8: mod_base = OTHER; note = 2'-O-methyl modified nucleotide
  modified_base 10: mod_base = OTHER; note = 2'-O-methyl modified nucleotide
  modified_base 13: mod_base = OTHER; note = 2'-O-methyl modified nucleotide
  modified_base 19: mod_base = OTHER; note = 2'-O-methyl modified nucleotide
  modified_base 20: mod_base = OTHER; note = 2'-O-methyl modified nucleotide
  modified_base 21: mod_base = OTHER; note = nucleotide attached to ggcaucguu via a L1 linker
gatgtgccgcaacgctctgcc

SEQ ID NO: 3189 - RNA, 21 nt, synthetic construct
  source 1..21: mol_type = other RNA
  modified_base 1: mod_base = OTHER; note = 2'-O-methyl modified nucleotide attached to position 22 of SEQ ID NO: 3094 via a L1 linker
  modified_base 2: mod_base = OTHER; note = 2'-O-methyl modified nucleotide
  modified_base 3: mod_base = OTHER; note = 2'-O-methyl modified nucleotide
  modified_base 8: mod_base = OTHER; note = 2'-O-methyl modified nucleotide
  modified_base 10: mod_base = OTHER; note = 2'-O-methyl modified nucleotide
  modified_base 13: mod_base = OTHER; note = 2'-O-methyl modified nucleotide
  modified_base 19: mod_base = OTHER; note = 2'-O-methyl modified nucleotide
  modified_base 20: mod_base = OTHER; note = 2'-O-methyl modified nucleotide
  modified_base 21: mod_base = OTHER; note = nucleotide attached to ggcaucguu via a L1 linker
gatgtgccgcaacgctctgcc

SEQ ID NO: 3190 - RNA, 21 nt, synthetic construct
  source 1..21: mol_type = other RNA
  modified_base 1: mod_base = OTHER; note = 2'-O-methyl modified nucleotide attached to position 22 of SEQ ID NO: 3095 via a L1 linker
  modified_base 2: mod_base = OTHER; note = 2'-O-methyl modified nucleotide
  modified_base 3: mod_base = OTHER; note = 2'-O-methyl modified nucleotide
  modified_base 8: mod_base = OTHER; note = 2'-O-methyl modified nucleotide
  modified_base 10: mod_base = OTHER; note = 2'-O-methyl modified nucleotide
  modified_base 13: mod_base = OTHER; note = 2'-O-methyl modified nucleotide
  modified_base 19: mod_base = OTHER; note = 2'-O-methyl modified nucleotide
  modified_base 20: mod_base = OTHER; note = 2'-O-methyl modified nucleotide
  modified_base 21: mod_base = OTHER; note = nucleotide attached to ggcaucguu via a L1 linker
gatgtgccgcaacgctctgcc

SEQ ID NO: 3191 - RNA, 21 nt, synthetic construct
  source 1..21: mol_type = other RNA
  modified_base 1: mod_base = OTHER; note = 2'-O-methyl modified nucleotide attached to position 22 of SEQ ID NO: 3096 via a L1 linker
  modified_base 2: mod_base = OTHER; note = 2'-O-methyl modified nucleotide
  modified_base 3: mod_base = OTHER; note = 2'-O-methyl modified nucleotide
  modified_base 8: mod_base = OTHER; note = 2'-O-methyl modified nucleotide
  modified_base 10: mod_base = OTHER; note = 2'-O-methyl modified nucleotide
  modified_base 13: mod_base = OTHER; note = 2'-O-methyl modified nucleotide
  modified_base 19: mod_base = OTHER; note = 2'-O-methyl modified nucleotide
  modified_base 20: mod_base = OTHER; note = 2'-O-methyl modified nucleotide
  modified_base 21: mod_base = OTHER; note = nucleotide attached to ggcaucguu via a L1 linker
gatgtgccgcaacgctctgcc

SEQ ID NO: 3192 - RNA, 21 nt, synthetic construct
  source 1..21: mol_type = other RNA
  modified_base 1: mod_base = OTHER; note = 2'-O-methyl modified nucleotide attached to position 22 of SEQ ID NO: 3097 via a L1 linker
  modified_base 2: mod_base = OTHER; note = 2'-O-methyl modified nucleotide
  modified_base 3: mod_base = OTHER; note = 2'-O-methyl modified nucleotide
  modified_base 8: mod_base = OTHER; note = 2'-O-methyl modified nucleotide
  modified_base 10: mod_base = OTHER; note = 2'-O-methyl modified nucleotide
  modified_base 13: mod_base = OTHER; note = 2'-O-methyl modified nucleotide
  modified_base 19: mod_base = OTHER; note = 2'-O-methyl modified nucleotide
  modified_base 20: mod_base = OTHER; note = 2'-O-methyl modified nucleotide
  modified_base 21: mod_base = OTHER; note = nucleotide attached to ggcaucguu via a L1 linker
gatgtgccgcaacgctctgcc

SEQ ID NO: 3193 - RNA, 21 nt, synthetic construct
  source 1..21: mol_type = other RNA
  modified_base 1: mod_base = OTHER; note = 2'-O-methyl modified nucleotide attached to position 22 of SEQ ID NO: 3098 via a L1 linker
  modified_base 2: mod_base = OTHER; note = 2'-O-methyl modified nucleotide
  modified_base 3: mod_base = OTHER; note = 2'-O-methyl modified nucleotide
  modified_base 8: mod_base = OTHER; note = 2'-O-methyl modified nucleotide
  modified_base 10: mod_base = OTHER; note = 2'-O-methyl modified nucleotide
  modified_base 13: mod_base = OTHER; note = 2'-O-methyl modified nucleotide
  modified_base 19: mod_base = OTHER; note = 2'-O-methyl modified nucleotide
  modified_base 20: mod_base = OTHER; note = 2'-O-methyl modified nucleotide
  modified_base 21: mod_base = OTHER; note = nucleotide attached to ggcaucguu via a L1 linker
gatgtgccgcaacgctctgcc

SEQ ID NO: 3194 - RNA, 21 nt, synthetic construct
  source 1..21: mol_type = other RNA
  modified_base 1: mod_base = OTHER; note = 2'-O-methyl modified nucleotide attached to position 22 of SEQ ID NO: 3099 via a L1 linker
  modified_base 2: mod_base = OTHER; note = 2'-O-methyl modified nucleotide
  modified_base 3: mod_base = OTHER; note = 2'-O-methyl modified nucleotide
  modified_base 8: mod_base = OTHER; note = 2'-O-methyl modified nucleotide
  modified_base 10: mod_base = OTHER; note = 2'-O-methyl modified nucleotide
  modified_base 13: mod_base = OTHER; note = 2'-O-methyl modified nucleotide
  modified_base 19: mod_base = OTHER; note = 2'-O-methyl modified nucleotide
  modified_base 20: mod_base = OTHER; note = 2'-O-methyl modified nucleotide
  modified_base 21: mod_base = OTHER; note = nucleotide attached to ggcaucguu via a L1 linker
gatgtgccgcaacgctctgcc

SEQ ID NO: 3195 - RNA, 21 nt, synthetic construct
  source 1..21: mol_type = other RNA
  modified_base 1: mod_base = OTHER; note = 2'-O-methyl modified nucleotide attached to position 22 of SEQ ID NO: 3100 via a L1 linker
  modified_base 2: mod_base = OTHER; note = 2'-O-methyl modified nucleotide
  modified_base 3: mod_base = OTHER; note = 2'-O-methyl modified nucleotide
  modified_base 8: mod_base = OTHER; note = 2'-O-methyl modified nucleotide
  modified_base 10: mod_base = OTHER; note = 2'-O-methyl modified nucleotide
  modified_base 13: mod_base = OTHER; note = 2'-O-methyl modified nucleotide
  modified_base 19: mod_base = OTHER; note = 2'-O-methyl modified nucleotide
  modified_base 20: mod_base = OTHER; note = 2'-O-methyl modified nucleotide
  modified_base 21: mod_base = OTHER; note = nucleotide attached to ggcaucguu via a L1 linker
gatgtgccgcaacgctctgcc

SEQ ID NO: 3196 - RNA, 21 nt, synthetic construct
  source 1..21: mol_type = other RNA
  modified_base 1: mod_base = OTHER; note = 2'-O-methyl modified nucleotide attached to position 22 of SEQ ID NO: 3101 via a L1 linker
  modified_base 2: mod_base = OTHER; note = 2'-O-methyl modified nucleotide
  modified_base 3: mod_base = OTHER; note = 2'-O-methyl modified nucleotide
  modified_base 8: mod_base = OTHER; note = 2'-O-methyl modified nucleotide
  modified_base 10: mod_base = OTHER; note = 2'-O-methyl modified nucleotide
  modified_base 13: mod_base = OTHER; note = 2'-O-methyl modified nucleotide
  modified_base 19: mod_base = OTHER; note = 2'-O-methyl modified nucleotide
  modified_base 20: mod_base = OTHER; note = 2'-O-methyl modified nucleotide
  modified_base 21: mod_base = OTHER; note = nucleotide attached to ggcaucguu via a L1 linker
gatgtgccgcaacgctctgcc

SEQ ID NO: 3197 - RNA, 21 nt, synthetic construct
  source 1..21: mol_type = other RNA
  modified_base 1: mod_base = OTHER; note = 2'-O-methyl modified nucleotide attached to position 22 of SEQ ID NO: 3102 via a L1 linker
  modified_base 2: mod_base = OTHER; note = 2'-O-methyl modified nucleotide
  modified_base 3: mod_base = OTHER; note = 2'-O-methyl modified nucleotide
  modified_base 8: mod_base = OTHER; note = 2'-O-methyl modified nucleotide
  modified_base 10: mod_base = OTHER; note = 2'-O-methyl modified nucleotide
  modified_base 13: mod_base = OTHER; note = 2'-O-methyl modified nucleotide
  modified_base 19: mod_base = OTHER; note = 2'-O-methyl modified nucleotide
  modified_base 20: mod_base = OTHER; note = 2'-O-methyl modified nucleotide
  modified_base 21: mod_base = OTHER; note = nucleotide attached to ggcaucguu via a L1 linker
gatgtgccgcaacgctctgcc

SEQ ID NO: 3198 - RNA, 21 nt, synthetic construct
  source 1..21: mol_type = other RNA
  modified_base 1: mod_base = OTHER; note = 2'-O-methyl modified nucleotide attached to position 22 of SEQ ID NO: 3103 via a L1 linker
  modified_base 2: mod_base = OTHER; note = 2'-O-methyl modified nucleotide
  modified_base 3: mod_base = OTHER; note = 2'-O-methyl modified nucleotide
  modified_base 8: mod_base = OTHER; note = 2'-O-methyl modified nucleotide
  modified_base 10: mod_base = OTHER; note = 2'-O-methyl modified nucleotide
  modified_base 13: mod_base = OTHER; note = 2'-O-methyl modified nucleotide
  modified_base 19: mod_base = OTHER; note = 2'-O-methyl modified nucleotide
  modified_base 20: mod_base = OTHER; note = 2'-O-methyl modified nucleotide
  modified_base 21: mod_base = OTHER; note = nucleotide attached to ggcaucguu via a L1 linker
gatgtgccgcaacgctctgcc

SEQ ID NO: 3199 - RNA, 21 nt, synthetic construct
  source 1..21: mol_type = other RNA
  modified_base 1: mod_base = OTHER; note = 2'-O-methyl modified nucleotide attached to position 22 of SEQ ID NO: 3104 via a L1 linker
  modified_base 2: mod_base = OTHER; note = 2'-O-methyl modified nucleotide
  modified_base 3: mod_base = OTHER; note = 2'-O-methyl modified nucleotide
  modified_base 8: mod_base = OTHER; note = 2'-O-methyl modified nucleotide
  modified_base 10: mod_base = OTHER; note = 2'-O-methyl modified nucleotide
  modified_base 13: mod_base = OTHER; note = 2'-O-methyl modified nucleotide
  modified_base 19: mod_base = OTHER; note = 2'-O-methyl modified nucleotide
  modified_base 20: mod_base = OTHER; note = 2'-O-methyl modified nucleotide
  modified_base 21: mod_base = OTHER; note = nucleotide attached to ggcaucguu via a L1 linker
gatgtgccgcaacgctctgcc

SEQ ID NO: 3200 - RNA, 21 nt, synthetic construct
  source 1..21: mol_type = other RNA
  modified_base 1: mod_base = OTHER; note = 2'-O-methyl modified nucleotide attached to position 22 of SEQ ID NO: 3105 via a L1 linker
  modified_base 2: mod_base = OTHER; note = 2'-O-methyl modified nucleotide
  modified_base 3: mod_base = OTHER; note = 2'-O-methyl modified nucleotide
  modified_base 8: mod_base = OTHER; note = 2'-O-methyl modified nucleotide
  modified_base 10: mod_base = OTHER; note = 2'-O-methyl modified nucleotide
  modified_base 13: mod_base = OTHER; note = 2'-O-methyl modified nucleotide
  modified_base 19: mod_base = OTHER; note = 2'-O-methyl modified nucleotide
  modified_base 20: mod_base = OTHER; note = 2'-O-methyl modified nucleotide
  modified_base 21: mod_base = OTHER; note = nucleotide attached to ggcaucguu via a L1 linker
gatgtgccgcaacgctctgcc

SEQ ID NO: 3201 - RNA, 21 nt, synthetic construct
  source 1..21: mol_type = other RNA
  modified_base 1: mod_base = OTHER; note = 2'-O-methyl modified nucleotide attached to position 22 of SEQ ID NO: 3106 via a L1 linker
  modified_base 2: mod_base = OTHER; note = 2'-O-methyl modified nucleotide
  modified_base 3: mod_base = OTHER; note = 2'-O-methyl modified nucleotide
  modified_base 8: mod_base = OTHER; note = 2'-O-methyl modified nucleotide
  modified_base 10: mod_base = OTHER; note = 2'-O-methyl modified nucleotide
  modified_base 13: mod_base = OTHER; note = 2'-O-methyl modified nucleotide
  modified_base 19: mod_base = OTHER; note = 2'-O-methyl modified nucleotide
  modified_base 20: mod_base = OTHER; note = 2'-O-methyl modified nucleotide
  modified_base 21: mod_base = OTHER; note = nucleotide attached to ggcaucguu via a L1 linker
gatgtgccgcaacgctctgcc

SEQ ID NO: 3202 - RNA, 21 nt, synthetic construct
  source 1..21: mol_type = other RNA
  modified_base 1: mod_base = OTHER; note = 2'-O-methyl modified nucleotide attached to position 22 of SEQ ID NO: 3107 via a L1 linker
  modified_base 2: mod_base = OTHER; note = 2'-O-methyl modified nucleotide
  modified_base 3: mod_base = OTHER; note = 2'-O-methyl modified nucleotide
  modified_base 8: mod_base = OTHER; note = 2'-O-methyl modified nucleotide
  modified_base 10: mod_base = OTHER; note = 2'-O-methyl modified nucleotide
  modified_base 13: mod_base = OTHER; note = 2'-O-methyl modified nucleotide
  modified_base 19: mod_base = OTHER; note = 2'-O-methyl modified nucleotide
  modified_base 20: mod_base = OTHER; note = 2'-O-methyl modified nucleotide
  modified_base 21: mod_base = OTHER; note = nucleotide attached to ggcaucguu via a L1 linker
gatgtgccgcaacgctctgcc

SEQ ID NO: 3203 - RNA, 21 nt, synthetic construct
  source 1..21: mol_type = other RNA
  modified_base 1: mod_base = OTHER; note = 2'-O-methyl modified nucleotide attached to position 22 of SEQ ID NO: 3108 via a L1 linker
  modified_base 2: mod_base = OTHER; note = 2'-O-methyl modified nucleotide
  modified_base 3: mod_base = OTHER; note = 2'-O-methyl modified nucleotide
  modified_base 8: mod_base = OTHER; note = 2'-O-methyl modified nucleotide
  modified_base 10: mod_base = OTHER; note = 2'-O-methyl modified nucleotide
  modified_base 13: mod_base = OTHER; note = 2'-O-methyl modified nucleotide
  modified_base 19: mod_base = OTHER; note = 2'-O-methyl modified nucleotide
  modified_base 20: mod_base = OTHER; note = 2'-O-methyl modified nucleotide
  modified_base 21: mod_base = OTHER; note = nucleotide attached to ggcaucguu via a L1 linker
gatgtgccgcaacgctctgcc

SEQ ID NO: 3204 - RNA, 21 nt, synthetic construct
  source 1..21: mol_type = other RNA
  modified_base 1: mod_base = OTHER; note = 2'-O-methyl modified nucleotide attached to position 22 of SEQ ID NO: 3109 via a L1 linker
  modified_base 2: mod_base = OTHER; note = 2'-O-methyl modified nucleotide
  modified_base 3: mod_base = OTHER; note = 2'-O-methyl modified nucleotide
  modified_base 8: mod_base = OTHER; note = 2'-O-methyl modified nucleotide
  modified_base 10: mod_base = OTHER; note = 2'-O-methyl modified nucleotide
  modified_base 13: mod_base = OTHER; note = 2'-O-methyl modified nucleotide
  modified_base 19: mod_base = OTHER; note = 2'-O-methyl modified nucleotide
  modified_base 20: mod_base = OTHER; note = 2'-O-methyl modified nucleotide
  modified_base 21: mod_base = OTHER; note = nucleotide attached to ggcaucguu via a L1 linker
gatgtgccgcaacgctctgcc

SEQ ID NO: 3205 - RNA, 21 nt, synthetic construct
  source 1..21: mol_type = other RNA
  modified_base 1: mod_base = OTHER; note = 2'-O-methyl modified nucleotide attached to position 22 of SEQ ID NO: 3110 via a L1 linker
  modified_base 2: mod_base = OTHER; note = 2'-O-methyl modified nucleotide
  modified_base 3: mod_base = OTHER; note = 2'-O-methyl modified nucleotide
  modified_base 8: mod_base = OTHER; note = 2'-O-methyl modified nucleotide
  modified_base 10: mod_base = OTHER; note = 2'-O-methyl modified nucleotide
  modified_base 13: mod_base = OTHER; note = 2'-O-methyl modified nucleotide
  modified_base 19: mod_base = OTHER; note = 2'-O-methyl modified nucleotide
  modified_base 20: mod_base = OTHER; note = 2'-O-methyl modified nucleotide
  modified_base 21: mod_base = OTHER; note = nucleotide attached to ggcaucguu via a L1 linker
gatgtgccgcaacgctctgcc

SEQ ID NO: 3206 - RNA, 22 nt, synthetic construct
  source 1..22: mol_type = other RNA
  modified_base 1: mod_base = OTHER; note = 2'-O-methyl modified nucleotide attached to position 37 of SEQ ID NO: 804 via a L1 linker
  modified_base 2: mod_base = OTHER; note = 2'-O-methyl modified nucleotide
  modified_base 6: mod_base = OTHER; note = 2'-O-methyl modified nucleotide
  modified_base 7: mod_base = OTHER; note = 2'-O-methyl modified nucleotide
  modified_base 10: mod_base = OTHER; note = 2'-O-methyl modified nucleotide
  modified_base 13: mod_base = OTHER; note = nucleotide with phosphorothioate linkage
  modified_base 17: mod_base = OTHER; note = 2'-O-methyl modified nucleotide
  modified_base 18: mod_base = OTHER; note = 2'-O-methyl modified nucleotide
  modified_base 20: mod_base = OTHER; note = 2'-O-methyl modified nucleotide
  modified_base 21: mod_base = OTHER; note = 2'-O-methyl modified nucleotide
  modified_base 22: mod_base = OTHER; note = 2'-O-methyl modified nucleotide attached to position 1 of SEQ ID NO: 3207 via a L1 linker
ccgttgctacaataaggccgtc

SEQ ID NO: 3207 - RNA, 21 nt, synthetic construct
  source 1..21: mol_type = other RNA
  modified_base 1: mod_base = OTHER; note = 2'-O-methyl modified nucleotide attached to position 22 of SEQ ID NO: 3206 via a L1 linker
  modified_base 2: mod_base = OTHER; note = 2'-O-methyl modified nucleotide
  modified_base 3: mod_base = OTHER; note = 2'-O-methyl modified nucleotide
  modified_base 8: mod_base = OTHER; note = 2'-O-methyl modified nucleotide
  modified_base 10: mod_base = OTHER; note = 2'-O-methyl modified nucleotide
  modified_base 13: mod_base = OTHER; note = 2'-O-methyl modified nucleotide
  modified_base 19: mod_base = OTHER; note = 2'-O-methyl modified nucleotide
  modified_base 20: mod_base = OTHER; note = 2'-O-methyl modified nucleotide
  modified_base 21: mod_base = OTHER; note = nucleotide attached to ggcaucguu via a L1 linker
gatgtgccgcaacgctctgcc
